(19) United States
(12) Patent Application Publication
(10) Pub. No.: US 2004/0018969 A1
(43) Pub. Date: Jan. 29, 2004

(54) Nucleic acids, proteins, and antibodies

(76) Inventors: Craig A. Rosen, Laytonsville, MD (US); Steven M. Ruben, Olney, MD (US); Steven C. Barash, Rockville, MD (US)

Correspondence Address: HUMAN GENOME SCIENCES INC, 9410 KEY WEST AVENUE, ROCKVILLE, MD, 20850

(21) Appl. No.: 09/764,875

(22) Filed: Jan. 17, 2001

Related U.S. Application Data
(60) Provisional application No. 60/179,065, filed on Jan. 31, 2000.
(60) Provisional application No. 60/180,628, filed on Feb. 4, 2000.
(60) Provisional application No. 60/214,886, filed on Jun. 28, 2000.
(60) Provisional application No. 60/217,487, filed on Jul. 11, 2000.
(60) Provisional application No. 60/225,758, filed on Aug. 14, 2000.
(60) Provisional application No. 60/220,963, filed on Jul. 26, 2000.
(60) Provisional application No. 60/217,496, filed on Jul. 11, 2000.
(60) Provisional application No. 60/225,447, filed on Aug. 14, 2000.
(60) Provisional application No. 60/218,290, filed on Jul. 14, 2000.
(60) Provisional application No. 60/225,757, filed on Aug. 14, 2000.
(60) Provisional application No. 60/226,868, filed on Aug. 22, 2000.
(60) Provisional application No. 60/216,647, filed on Jul. 7, 2000.
(60) Provisional application No. 60/225,267, filed on Aug. 14, 2000.
(60) Provisional application No. 60/216,880, filed on Jul. 7, 2000.
(60) Provisional application No. 60/225,270, filed on Aug. 14, 2000.
(60) Provisional application No. 60/251,869, filed on Dec. 8, 2000.
(60) Provisional application No. 60/235,834, filed on Sep. 27, 2000.
(60) Provisional application No. 60/234,274, filed on Sep. 21, 2000.
(60) Provisional application No. 60/234,223, filed on Sep. 21, 2000.
(60) Provisional application No. 60/228,924, filed on Aug. 30, 2000.
(60) Provisional application No. 60/224,518, filed on Aug. 14, 2000.
(60) Provisional application No. 60/236,369, filed on Sep. 29, 2000.
(60) Provisional application No. 60/224,519, filed on Aug. 14, 2000.
(60) Provisional application No. 60/220,964, filed on Jul. 26, 2000.
(60) Provisional application No. 60/241,809, filed on Oct. 20, 2000.
(60) Provisional application No. 60/249,299, filed on Nov. 17, 2000.
(60) Provisional application No. 60/236,327, filed on Sep. 29, 2000.
(60) Provisional application No. 60/241,785, filed on Oct. 20, 2000.
(60) Provisional application No. 60/244,617, filed on Nov. 1, 2000.
(60) Provisional application No. 60/225,268, filed on Aug. 14, 2000.
(60) Provisional application No. 60/236,368, filed on Sep. 29, 2000.
(60) Provisional application No. 60/251,856, filed on Dec. 8, 2000.
(60) Provisional application No. 60/251,868, filed on Dec. 8, 2000.
(60) Provisional application No. 60/229,344, filed on Sep. 1, 2000.
(60) Provisional application No. 60/234,997, filed on Sep. 25, 2000.
(60) Provisional application No. 60/229,343, filed on Sep. 1, 2000.
(60) Provisional application No. 60/229,345, filed on Sep. 1, 2000.
(60) Provisional application No. 60/229,287, filed on Sep. 1, 2000.
(60) Provisional application No. 60/229,513, filed on Sep. 5, 2000.
(60) Provisional application No. 60/231,413, filed on Sep. 8, 2000.
(60) Provisional application No. 60/229,509, filed on Sep. 5, 2000.
(60) Provisional application No. 60/236,367, filed on Sep. 29, 2000.
(60) Provisional application No. 60/237,039, filed on Oct. 2, 2000.
(60) Provisional application No. 60/237,038, filed on Oct. 2, 2000.
(60) Provisional application No. 60/236,370, filed on Sep. 29, 2000.
(60) Provisional application No. 60/236,802, filed on Oct. 2, 2000.
(60) Provisional application No. 60/237,037, filed on Oct. 2, 2000.
(60) Provisional application No. 60/237,040, filed on Oct. 2, 2000.
(60) Provisional application No. 60/240,960, filed on Oct. 20, 2000.
(60) Provisional application No. 60/239,935, filed on Oct. 13, 2000.
(60) Provisional application No. 60/239,937, filed on Oct. 13, 2000.
(60) Provisional application No. 60/241,787, filed on Oct. 20, 2000.
(60) Provisional application No. 60/246,474, filed on Nov. 8, 2000.
(60) Provisional application No. 60/246,532, filed on Nov. 8, 2000.
(60) Provisional application No. 60/249,216, filed on Nov. 17, 2000.
(60) Provisional application No. 60/249,210, filed on Nov. 17, 2000.
(60) Provisional application No. 60/226,681, filed on Aug. 22, 2000.
(60) Provisional application No. 60/225,759, filed on Aug. 14, 2000.
(60) Provisional application No. 60/225,213, filed on Aug. 14, 2000.
(60) Provisional application No. 60/227,182, filed on Aug. 22, 2000.
(60) Provisional application No. 60/225,214, filed on Aug. 14, 2000.
(60) Provisional application No. 60/235,836, filed on Sep. 27, 2000.
(60) Provisional application No. 60/230,438, filed on Sep. 6, 2000.
(60) Provisional application No. 60/215,135, filed on Jun. 30, 2000.
(60) Provisional application No. 60/225,266, filed on Aug. 14, 2000.
(60) Provisional application No. 60/249,218, filed on Nov. 17, 2000.
(60) Provisional application No. 60/249,208, filed on Nov. 17, 2000.
(60) Provisional application No. 60/249,213, filed on Nov. 17, 2000.
(60) Provisional application No. 60/249,212, filed on Nov. 17, 2000.
(60) Provisional application No. 60/249,207, filed on Nov. 17, 2000.
(60) Provisional application No. 60/249,245, filed on Nov. 17, 2000.
(60) Provisional application No. 60/249,244, filed on Nov. 17, 2000.
(60) Provisional application No. 60/249,217, filed on Nov. 17, 2000.
(60) Provisional application No. 60/249,211, filed on Nov. 17, 2000.
(60) Provisional application No. 60/249,215, filed on Nov. 17, 2000.
(60) Provisional application No. 60/249,264, filed on Nov. 17, 2000.
(60) Provisional application No. 60/249,214, filed on Nov. 17, 2000.
(60) Provisional application No. 60/249,297, filed on Nov. 17, 2000.
(60) Provisional application No. 60/232,400, filed on Sep. 14, 2000.
(60) Provisional application No. 60/231,242, filed on Sep. 8, 2000.
(60) Provisional application No. 60/232,081, filed on Sep. 8, 2000.
(60) Provisional application No. 60/232,080, filed on Sep. 8, 2000.
(60) Provisional application No. 60/231,414, filed on Sep. 8, 2000.
(60) Provisional application No. 60/231,244, filed on Sep. 8, 2000.
(60) Provisional application No. 60/233,064, filed on Sep. 14, 2000.
(60) Provisional application No. 60/233,063, filed on Sep. 14, 2000.
(60) Provisional application No. 60/232,397, filed on Sep. 14, 2000.
(60) Provisional application No. 60/232,399, filed on Sep. 14, 2000.
(60) Provisional application No. 60/232,401, filed on Sep. 14, 2000.
(60) Provisional application No. 60/241,808, filed on Oct. 20, 2000.
(60) Provisional application No. 60/241,826, filed on Oct. 20, 2000.
(60) Provisional application No. 60/241,786, filed on Oct. 20, 2000.
(60) Provisional application No. 60/241,221, filed on Oct. 20, 2000.
(60) Provisional application No. 60/246,475, filed on Nov. 8, 2000.
(60) Provisional application No. 60/231,243, filed on Sep. 8, 2000.
(60) Provisional application No. 60/233,065, filed on Sep. 14, 2000.
(60) Provisional application No. 60/232,398, filed on Sep. 14, 2000.
(60) Provisional application No. 60/234,998, filed on Sep. 25, 2000.
(60) Provisional application No. 60/246,477, filed on Nov. 8, 2000.
(60) Provisional application No. 60/246,528, filed on Nov. 8, 2000.
(60) Provisional application No. 60/246,525, filed on Nov. 8, 2000.
(60) Provisional application No. 60/246,476, filed on Nov. 8, 2000.
(60) Provisional application No. 60/246,526, filed on Nov. 8, 2000.
(60) Provisional application No. 60/249,209, filed on Nov. 17, 2000.
(60) Provisional application No. 60/246,527, filed on Nov. 8, 2000.
(60) Provisional application No. 60/246,523, filed on Nov. 8, 2000.
(60) Provisional application No. 60/246,524, filed on Nov. 8, 2000.
(60) Provisional application No. 60/246,478, filed on Nov. 8, 2000.
(60) Provisional application No. 60/246,609, filed on Nov. 8, 2000.
(60) Provisional application No. 60/246,613, filed on Nov. 8, 2000.
(60) Provisional application No. 60/249,300, filed on Nov. 17, 2000.
(60) Provisional application No. 60/249,265, filed on Nov. 17, 2000.
(60) Provisional application No. 60/246,610, filed on Nov. 8, 2000.
(60) Provisional application No. 60/246,611, filed on Nov. 8, 2000.
(60) Provisional application No. 60/230,437, filed on Sep. 6, 2000.
(60) Provisional application No. 60/251,990, filed on Dec. 8, 2000.
(60) Provisional application No. 60/251,988, filed on Dec. 5, 2000.
(60) Provisional application No. 60/251,030, filed on Dec. 5, 2000.
(60) Provisional application No. 60/251,479, filed on Dec. 6, 2000.
(60) Provisional application No. 60/256,719, filed on Dec. 5, 2000.
(60) Provisional application No. 60/250,160, filed on Dec. 1, 2000.
(60) Provisional application No. 60/251,989, filed on Dec. 8, 2000.
(60) Provisional application No. 60/250,391, filed on Dec. 1, 2000.
(60) Provisional application No. 60/254,097, filed on Dec. 11, 2000.
(60) Provisional application No. 60/231,968, filed on Sep. 12, 2000.
(60) Provisional application No. 60/226,279, filed on Aug. 18, 2000.
(60) Provisional application No. 60/186,350, filed on Mar. 2, 2000.
(60) Provisional application No. 60/184,664, filed on Feb. 24, 2000.
(60) Provisional application No. 60/189,874, filed on Mar. 16, 2000.
(60) Provisional application No. 60/198,123, filed on Apr. 18, 2000.
(60) Provisional application No. 60/227,009, filed on Aug. 23, 2000.
(60) Provisional application No. 60/235,484, filed on Sep. 26, 2000.
(60) Provisional application No. 60/190,076, filed on Mar. 17, 2000.
(60) Provisional application No. 60/209,467, filed on Jun. 7, 2000.
(60) Provisional application No. 60/205,515, filed on May 19, 2000.
(60) Provisional application No. 60/259,678, filed on Jan. 5, 2001.

(51) Int. Cl. C12Q 1/68; C07H 21/04; C12N 9/00; C12P 21/02; C12N 5/06; C07K 14/47; A61K 48/00; A61K 38/17

(52) U.S. Cl. 514/12; 514/44; 530/350; 530/388.1; 536/23.2; 435/6; 435/183; 435/69.1; 435/320.1; 435/325

(57) ABSTRACT

The present invention relates to novel proteins. More specifically, isolated nucleic acid molecules are provided encoding novel polypeptides. Novel polypeptides and antibodies that bind to these polypeptides are provided. Also provided are vectors, host cells, and recombinant and synthetic methods for producing human polynucleotides and/or polypeptides, and antibodies. The invention further relates to diagnostic and therapeutic methods useful for diagnosing, treating, preventing and/or prognosing disorders related to these novel polypeptides. The invention further relates to screening methods for identifying agonists and antagonists of polynucleotides and polypeptides of the invention. The present invention further relates to methods and/or compositions for inhibiting or enhancing the production and function of the polypeptides of the present invention.

### STATEMENT UNDER 37 C.F.R. §1.77(b)(4)

[0001] This application refers to a “Sequence Listing” listed below, which is provided as an electronic document on two identical compact discs (CD-R), labeled “Copy 1” and “Copy 2.” These compact discs each contain the following files, which are hereby incorporated in their entirety herein:

| | | | |
|---|---|---|---|
| | File | Size in | Date of |
| Document | Name | bytes | Creation |

| | | | |
|---|---|---|---|
| Sequence Listing | PJZO2_seqList.txt | 2,365,610 | Jan. 15, 2001 |
| V Viewer Setup File | SetupDLL.exe | 695,808 | Dec. 19, 2000 |
| V Viewer Help | v.cnt | 7,984 | Jan. 05, 2001 |
| File Controller | | | |
| V Viewer Program | v.exe | 753,664 | Dec. 19, 2000 |
| File | | | |
| V Viewer Help File | v.hlp | 447,766 | Jan. 05, 2001 |

[0002] The Sequence Listing may be viewed on an IBM-PC machine running the MS-Windows operating system by using the V viewer software, licensed by HGS, Inc., included on the compact discs (see World Wide Web URL: http://www.fileviewer.com).

### FIELD OF THE INVENTION

[0003] The present invention relates to novel proteins. More specifically, isolated nucleic acid molecules are provided encoding novel polypeptides. Novel polypeptides and antibodies that bind to these polypeptides are provided. Also provided are vectors, host cells, and recombinant and synthetic methods for producing human polynucleotides and/or polypeptides, and antibodies. The invention further relates to diagnostic and therapeutic methods useful for diagnosing, treating, preventing and/or prognosing disorders related to these novel polypeptides. The invention further relates to screening methods for identifying agonists and antagonists of polynucleotides and polypeptides of the invention. The present invention further relates to methods and/or compositions for inhibiting or enhancing the production and function of the polypeptides of the present invention.

### BACKGROUND OF THE INVENTION

[0004] The brain regulates every aspect of human behavior and physiology, from movement, heart rate, blood pressure, and body temperature, to language, emotion, and memories. The prominence of the nervous system among other bodily systems is evidenced by the disproportionate amount of resources consumed by the brain. While comprising only 2% of the body's weight, the brain consumes 20% of the body's oxygen, 25% of the body's glucose, and receives 15% of the cardiac output (see Circulation and energy metabolism of the brain. In: Siegel G, Agranoff B, Albers R W, and Molinoff P, eds. Basic Neurochemistry: molecular, cellular, and medical aspects. 4th ed. New York: Raven Press (1989)).

[0005] The nervous system is organized into the central nervous system (CNS; comprising the brain and spinal cord), and the peripheral nervous system (PNS; comprising the network of nerves that connects the brain and spinal cord to the rest of the body). The basic functional units of the CNS and PNS are neurons, usually composed of dendrites (branching specializations which receive input from other neurons), a cell body (containing the machinery to sustain cellular functions), and an axon (which transmits electrical signals to other neurons or muscle cells). Electrical impulses, propagated along axons by voltage-gated ion channels, are converted to chemical signals at junctions between neurons called synapses. Calcium-mediated exocytosis of storage vesicles in the axon terminal leads to neurotransmitter release into the synaptic cleft. The signaling molecules passively diffuse to the postsynaptic membrane and bind to neurotransmitter-specific receptor proteins. Depending on the type of receptor activated, neurotransmitter binding can have a variety of effects on the postsynaptic cell, including activation of second messenger biocehmical cascades and modulation of ion channel permeability. These biochemical and biophysical changes influence the subsequent behavior of the neuron, for example making the cell more or less excitable to incoming signals.

[0006] The elaborate circuitry of the adult nervous system arises through an interaction between genetically programmed growth patterns and environmental influences. During embryonic development, neural connections are formed via the programmed extension of axons under the influence of local molecular cues. Through post-natal development, this coarse pattern of connections is refined based on specific interactions between the child and the environment. It is believed that there are critical periods of neural development in childhood, during which environmental stimulation has a more profound effect on nervous system organization than during adulthood. For example, it is known that sensory deprivation in early childhood (such as blindness or deafness), leads to measurable differences in brain organization (see, for examples, Roder et al., Nature 400(6740):162-6 (1999); Buchel et al., Brain 121 (Pt 3):409-19 (1998)).

[0007] Because of its integral role in human behavior and physiology, disorders of the nervous system are among the most debilitating diseases known. Since the adult nervous system has very limited ability to regenerate, neural injury due to illness or trauma can produce life-long impairments. About half of all spinal cord injuries result in permenant loss of movement and sensation in the arms and legs (quadriplegia). Similarly, up to 30% of stroke survivors are left permanently disabled (American Heart Association 2000 Heart and Stroke Statistical Update, Dallas, Tex. (1999)). Methods of promoting neural tissue regeneration—for example, to repair spinal cord injuries or brain tissue damage—is a major focus of modern neurobiology. However, currently there is no effective way to repair damaged adult neural tissues.

[0008] A number of neurological conditions, including schizophrenia, depression, and myesthenia gravis, involve impaired or inappropriate synaptic communication between neurons. Drug therapies designed to correct the synaptic chemical imbalances underlying these disorders, such as dopamine receptor antagonists for schizophrenia and serotonin uptake inhibitors for depression, have had varying degrees of success, at the cost of sometimes serious side-effects.

[0009] The immune system is suspected to play a role in some neurological disorders and conditions. For example, multiple sclerosis, which is characterized by sensory impairments (tingling, numbness, dizziness, loss of vision) and motor impairments (tremor, weakness, loss of coordination), is thought to be an autoimmune disorder in which immune cells destroy the insulating myelin sheath covering axons. In addition, the inflammatory immune response can be a serious complication of brain injury (e.g. trauma and stroke), spinal cord damage, and infection (e.g. encephalitis and meningitis), and may be a common pathological mechanism in many other neurological disorders (Hays, Curr. Pharm. Des. 4:335-48 (1998); Halliday et al., Clin. Exp. Pharmacol. Physiol. 27:1-8 (2000)).

[0010] The field of neurobiology is only beginning to uncover the biological basis of neurological diseases. In fact, in most cases the underlying cause or causes remain poorly understood. Thus, the discovery of new human nervous system-associated polynucleotides, the polypeptides encoded by them, and antibodies that immunospecifically bind these polypeptides, satisfies a need in the art by providing new compositions which are useful in the diagnosis, treatment, prevention and/or prognosis of neurological diseases, disorders, and/or conditions, including, but not limited to, neuropsychiatric disorders, neurodegenerative diseases, vascular disorders, developmental disorders, infections, and neoplastic disorders.

### SUMMARY OF THE INVENTION

[0011] The present invention relates to novel proteins. More specifically, isolated nucleic acid molecules are provided encoding novel polypeptides. Novel polypeptides and antibodies that bind to these polypeptides are provided. Also provided are vectors, host cells, and recombinant and synthetic methods for producing human polynucleotides and/or polypeptides, and antibodies. The invention further relates to diagnostic and therapeutic methods useful for diagnosing, treating, preventing and/or prognosing disorders related to these novel polypeptides. The invention further relates to screening methods for identifying agonists and antagonists of polynucleotides and polypeptides of the invention. The present invention further relates to methods and/or compositions for inhibiting or enhancing the production and function of the polypeptides of the present invention.

### DETAILED DESCRIPTION

[0012] Tables

[0013] Table 1A summarizes some of the polynucleotides encompassed by the invention (including cDNA clones related to the sequences (Clone ID NO:Z), contig sequences (contig identifier (Contig ID:) and contig nucleotide sequence identifier (SEQ ID NO:X)) and further summarizes certain characteristics of these polynucleotides and the polypeptides encoded thereby. The first column provides the gene number in the application for each clone identifier. The second column provides a unique clone identifier, “Clone ID NO:Z”, for a cDNA clone related to each contig sequence disclosed in Table 1A. The third column provides a unique contig identifier, “Contig ID:” for each of the contig sequences disclosed in Table 1A. The fourth column provides the sequence identifier, “SEQ ID NO:X”, for each of the contig sequences disclosed in Table 1A. The fifth column, “ORF (From-To)”, provides the location (i.e., nucleotide position numbers) within the polynucleotide sequence of SEQ ID NO:X that delineate the preferred open reading frame (ORF) that encodes the amino acid sequence shown in the sequence listing and referenced in Table 1A as SEQ ID NO:Y (column 6). Column 7 lists residues comprising predicted epitopes contained in the polypeptides encoded by each of the preferred ORFs (SEQ ID NO:Y). Identification of potential immunogenic regions was performed according to the method of Jameson and Wolf (CABIOS, 4; 181-186 (1988)); specifically, the Genetics Computer Group (GCG) implementation of this algorithm, embodied in the program PEPTIDESTRUCTURE (Wisconsin Package v10.0, Genetics Computer Group (GCG), Madison, Wis.). This method returns a measure of the probability that a given residue is found on the surface of the protein. Regions where the antigenic index score is greater than 0.9 over at least 6 amino acids are indicated in Table 1A as “Predicted Epitopes”. In particular embodiments, polypeptides of the invention comprise, or alternatively consist of, one, two, three, four, five or more of the predicted epitopes described in Table 1A. It will be appreciated that depending on the analytical criteria used to predict antigenic determinants, the exact address of the determinant may vary slightly. Column 8, “Tissue Distribution” shows the expression profile of tissue, cells, and/or cell line libraries which express the polynucleotides of the invention. The first number in column 8 (preceding the colon), represents the tissue/cell source identifier code corresponding to the key provided in Table 4. Expression of these polynucleotides was not observed in the other tissues and/or cell libraries tested. For those identifier codes in which the first two letters are not “AR”, the second number in column 8 (following the colon), represents the number of times a sequence corresponding to the reference polynucleotide sequence (e.g., SEQ ID NO:X) was identified in the tissue/cell source. Those tissue/cell source identifier codes in which the first two letters are “AR” designate information generated using DNA array technology. Utilizing this technology, cDNAs were amplified by PCR and then transferred, in duplicate, onto the array. Gene expression was assayed through hybridization of first strand cDNA probes to the DNA array. cDNA probes were generated from total RNA extracted from a variety of different tissues and cell lines. Probe synthesis was performed in the presence of ³³P dCTP, using oligo(dT) to prime reverse transcription. After hybridization, high stringency washing conditions were employed to remove non-specific hybrids from the array. The remaining signal, emanating from each gene target, was measured using a Phosphorimager. Gene expression was reported as Phosphor Stimulating Luminescence (PSL) which reflects the level of phosphor signal generated from the probe hybridized to each of the gene targets represented on the array. A local background signal subtraction was performed before the total signal generated from each array was used to normalize gene expression between the different hybridizations. The value presented after “[array code]:” represents the mean of the duplicate values, following background subtraction and probe normalization. One of skill in the art could routinely use this information to identify normal and/or diseased tissue(s) which show a predominant expression pattern of the corresponding polynucleotide of the invention or to identify polynucleotides which show predominant and/or specific tissue and/or cell expression. Column 9 provides the chromosomal location of polynucleotides corresponding to SEQ ID NO:X. Chromosomal location was determined by finding exact matches to EST and cDNA sequences contained in the NCBI (National Center for Biotechnology Information) UniGene database. Given a presumptive chromosomal location, disease locus association was determined by comparison with the Morbid Map, derived from Online Mendelian Inheritance in Man (Online Mendelian Inheritance in Man, OMIM™. McKusick-Nathans Institute for Genetic Medicine, Johns Hopkins University (Baltimore, Md.) and National Center for Biotechnology Information, National Library of Medicine (Bethesda, Md.) 2000. World Wide Web URL: http://www.ncbi.nlm.nih.gov/omim/). If the putative chromosomal location of the Query overlaps with the chromosomal location of a Morbid Map entry, an OMIM identification number is disclosed in column 10 labeled “OMIM Disease Reference(s)”. A key to the OMIM reference identification numbers is provided in Table 5.

[0014] Table 1B summarizes additional polynucleotides encompassed by the invention (including cDNA clones related to the sequences (Clone ID NO:Z), contig sequences (contig identifier (Contig ID:) contig nucleotide sequence identifiers (SEQ ID NO:X)), and genomic sequences (SEQ ID NO:B). The first column provides a unique clone identifier, “Clone ID NO:Z”, for a cDNA clone related to each contig sequence. The second column provides the sequence identifier, “SEQ ID NO:X”, for each contig sequence. The third column provides a unique contig identifier, “Contig ID:” for each contig sequence. The fourth column, provides a BAC identifier “BAC ID NO:A” for the BAC clone referenced in the corresponding row of the table. The fifth column provides the nucleotide sequence identifier, “SEQ ID NO:B” for a fragment of the BAC clone identified in column four of the corresponding row of the table. The sixth column, “Exon From-To”, provides the location (i.e., nucleotide position numbers) within the polynucleotide sequence of SEQ ID NO:B which delineate certain polynucleotides of the invention that are also exemplary members of polynucleotide sequences that encode polypeptides of the invention (e.g., polypeptides containing amino acid sequences encoded by the polynucleotide sequences delineated in column six, and fragments and variants thereof).

[0015] Table 2 summarizes homology and features of some of the polypeptides of the invention. The first column provides a unique clone identifier, “Clone ID NO:Z”, corresponding to a cDNA clone disclosed in Table 1A. The second column provides the unique contig identifier, “Contig ID:” corresponding to contigs in Table 1A and allowing for correlation with the information in Table 1A. The third column provides the sequence identifier, “SEQ ID NO:X”, for the contig polynucleotide sequence. The fourth column provides the analysis method by which the homology/identity disclosed in the Table was determined. Comparisons were made between polypeptides encoded by the polynucleotides of the invention and either a non-redundant protein database (herein referred to as “NR”), or a database of protein families (herein referred to as “PFAM”) as further described below. The fifth column provides a description of the PFAM/NR hit having a significant match to a polypeptide of the invention. Column six provides the accession number of the PFAM/NR hit disclosed in the fifth column. Column seven, “Score/Percent Identity”, provides a quality score or the percent identity, of the hit disclosed in columns five and six. Columns 8 and 9, “NT From” and “NT To” respectively, delineate the polynucleotides in “SEQ ID NO:X” that encode a polypeptide having a significant match to the PFAM/NR database as disclosed in the fifth and sixth columns. In specific embodiments polypeptides of the invention comprise, or alternatively consist of, an amino acid sequence encoded by a polynucleotide in SEQ ID NO:X as delineated in columns 8 and 9, or fragments or variants thereof.

[0016] Table 3 provides polynucleotide sequences that may be disclaimed according to certain embodiments of the invention. The first column provides a unique clone identifier, “Clone ID”, for a cDNA clone related to contig sequences disclosed in Table 1A. The second column provides the sequence identifier, “SEQ ID NO:X”, for contig sequences disclosed in Table 1A. The third column provides the unique contig identifier, “Contig ID:”, for contigs disclosed in Table 1A. The fourth column provides a unique integer ‘a’ where ‘a’ is any integer between 1 and the final nucleotide minus 15 of SEQ ID NO:X, and the fifth column provides a unique integer ‘b’ where ‘b’ is any integer between 15 and the final nucleotide of SEQ ID NO:X, where both a and b correspond to the positions of nucleotide residues shown in SEQ ID NO:X, and where b is greater than or equal to a +14. For each of the polynucleotides shown as SEQ ID NO:X, the uniquely defined integers can be substituted into the general formula of a-b, and used to describe polynucleotides which may be preferably excluded from the invention. In certain embodiments, preferably excluded from the invention are at least one, two, three, four, five, ten, or more of the polynucleotide sequence(s) having the accession number(s) disclosed in the sixth column of this Table (including for example, published sequence in connection with a particular BAC clone). In further embodiments, preferably excluded from the invention are the specific polynucleotide sequence(s) contained in the clones corresponding to at least one, two, three, four, five, ten, or more of the available material having the accession numbers identified in the sixth column of this Table (including for example, the actual sequence contained in an identified BAC clone).

[0017] Table 4 provides a key to the tissue/cell source identifier code disclosed in Table 1A, column 8. Column 1 provides the tissue/cell source identifier code disclosed in Table 1A, Column 8. Columns 2-5 provide a description of the tissue or cell source. Codes corresponding to diseased tissues are indicated in column 6 with the word “disease”. The use of the word “disease” in column 6 is non-limiting. The tissue or cell source may be specific (e.g. a neoplasm), or may be disease-associated (e.g., a tissue sample from a normal portion of a diseased organ). Furthermore, tissues and/or cells lacking the “disease” designation may still be derived from sources directly or indirectly involved in a disease state or disorder, and therefore may have a further utility in that disease state or disorder. In numerous cases where the tissue/cell source is a library, column 7 identifies the vector used to generate the library.

[0018] Table 5 provides a key to the OMIM reference identification numbers disclosed in Table 1A, column 10. OMIM reference identification numbers (Column 1) were derived from Online Mendelian Inheritance in Man (Online Mendelian Inheritance in Man, OMIM. McKusick-Nathans Institute for Genetic Medicine, Johns Hopkins University (Baltimore, Md.) and National Center for Biotechnology Information, National Library of Medicine, (Bethesda, Md.) 2000. World Wide Web URL: http://www.ncbi.nlm.nih.gov/omim/). Column 2 provides diseases associated with the cytologic band disclosed in Table 1A, column 9, as determined using the Morbid Map database.

[0019] Table 6 summarizes ATCC Deposits, Deposit dates, and ATCC designation numbers of deposits made with the ATCC in connection with the present application.

[0020] Table 7 shows the cDNA libraries sequenced, and ATCC designation numbers and vector information relating to these cDNA libraries.

[0021] Table 8 provides a physical characterization of clones encompassed by the invention. The first column provides the unique clone identifier, “Clone ID NO:Z”, for certain cDNA clones of the invention, as described in Table 1A. The second column provides the size of the cDNA insert contained in the corresponding cDNA clone.

[0022] Definitions

[0023] The following definitions are provided to facilitate understanding of certain terms used throughout this specification.

[0024] In the present invention, “isolated” refers to material removed from its original environment (e.g., the natural environment if it is naturally occurring), and thus is altered “by the hand of man” from its natural state. For example, an isolated polynucleotide could be part of a vector or a composition of matter, or could be contained within a cell, and still be “isolated” because that vector, composition of matter, or particular cell is not the original environment of the polynucleotide. The term “isolated” does not refer to genomic or cDNA libraries, whole cell total or mRNA preparations, genomic DNA preparations (including those separated by electrophoresis and transferred onto blots), sheared whole cell genomic DNA preparations or other compositions where the art demonstrates no distinguishing features of the polynucleotide/sequences of the present invention.

[0025] As used herein, a “polynucleotide” refers to a molecule having a nucleic acid sequence encoding SEQ ID NO:Y or a fragment or variant thereof, a nucleic acid sequence contained in SEQ ID NO:X (as described in column 3 of Table 1A) or the complement thereof, a cDNA sequence contained in Clone ID NO:Z (as described in column 2 of Table 1A and contained within a library deposited with the ATCC); a nucleotide sequence encoding the polypeptide encoded by a nucleotide sequence in SEQ ID NO:B as defined in column 6 of Table 1B or a fragment or variant thereof; or a nucleotide coding sequence in SEQ ID NO:B as defined in column 6 of Table 1B or the complement thereof. For example, the polynucleotide can contain the nucleotide sequence of the full length cDNA sequence, including the 5′ and 3′ untranslated sequences, the coding region, as well as fragments, epitopes, domains, and variants of the nucleic acid sequence. Moreover, as used herein, a “polypeptide” refers to a molecule having an amino acid sequence encoded by a polynucleotide of the invention as broadly defined (obviously excluding poly-Phenylalanine or poly-Lysine peptide sequences which result from translation of a polyA tail of a sequence corresponding to a cDNA).

[0026] In the present invention, “SEQ ID NO:X” was often generated by overlapping sequences contained in multiple clones (contig analysis). A representative clone containing all or most of the sequence for SEQ ID NO:X is deposited at Human Genome Sciences, Inc. (HGS) in a catalogued and archived library. As shown, for example, in column 2 of Table 1A, each clone is identified by a cDNA Clone ID (identifier generally referred to herein as Clone ID NO:Z). Each Clone ID is unique to an individual clone and the Clone ID is all the information needed to retrieve a given clone from the HGS library. Furthermore, certain clones disclosed in this application have been deposited with the ATCC on Oct. 5, 2000, having the ATCC designation numbers PTA 2574 and PTA 2575; and on Jan. 5, 2001, having the depositor reference numbers TS-1, TS-2, AC-1, and AC-2. In addition to the individual cDNA clone deposits, most of the cDNA libraries from which the clones were derived were deposited at the American Type Culture Collection (hereinafter “ATCC”). Table 7 provides a list of the deposited cDNA libraries. One can use the Clone ID NO:Z to determine the library source by reference to Tables 6 and 7. Table 7 lists the deposited cDNA libraries by name and links each library to an ATCC Deposit. Library names contain four characters, for example, “HTWE.” The name of a cDNA clone (Clone ID) isolated from that library begins with the same four characters, for example “HTWEP07”. As mentioned below, Table 1A correlates the Clone ID names with SEQ ID NO:X. Thus, starting with an SEQ ID NO:X, one can use Tables 1, 6 and 7 to determine the corresponding Clone ID, which library it came from and which ATCC deposit the library is contained in. Furthermore, it is possible to retrieve a given cDNA clone from the source library by techniques known in the art and described elsewhere herein. The ATCC is located at 10801 University Boulevard, Manassas, Va. 20110-2209, USA. The ATCC deposits were made pursuant to the terms of the Budapest Treaty on the international recognition of the deposit of microorganisms for the purposes of patent procedure.

[0027] In specific embodiments, the polynucleotides of the invention are at least 15, at least 30, at least 50, at least 100, at least 125, at least 500, or at least 1000 continuous nucleotides but are less than or equal to 300 kb, 200 kb, 100 kb, 50 kb, 15 kb, 10 kb, 7.5 kb, 5 kb, 2.5 kb, 2.0 kb, or 1 kb, in length. In a further embodiment, polynucleotides of the invention comprise a portion of the coding sequences, as disclosed herein, but do not comprise all or a portion of any intron. In another embodiment, the polynucleotides comprising coding sequences do not contain coding sequences of a genomic flanking gene (i.e., 5′ or 3′ to the gene of interest in the genome). In other embodiments, the polynucleotides of the invention do not contain the coding sequence of more than 1000, 500, 250, 100, 50, 25, 20, 15, 10, 5, 4, 3, 2, or 1 genomic flanking gene(s).

[0028] A “polynucleotide” of the present invention also includes those polynucleotides capable of hybridizing, under stringent hybridization conditions, to sequences contained in SEQ ID NO:X, or the complement thereof (e.g., the complement of any one, two, three, four, or more of the polynucleotide fragments described herein), the polynucleotide sequence delineated in columns 8 and 9 of Table 2 or the complement thereof, and/or cDNA sequences contained in Clone ID NO:Z (e.g., the complement of any one, two, three, four, or more of the polynucleotide fragments, or the cDNA clone within the pool of cDNA clones deposited with the ATCC, described herein), and/or the polynucleotide sequence delineated in column 6 of Table 1B or the complement thereof. “Stringent hybridization conditions” refers to an overnight incubation at 42 degree C. in a solution comprising 50% formamide, 5×SSC (750 mM NaCl, 75 mM trisodium citrate), 50 mM sodium phosphate (pH 7.6), 5× Denhardt's solution, 10% dextran sulfate, and 20 μg/ml denatured, sheared salmon sperm DNA, followed by washing the filters in 0.1×SSC at about 65 degree C.

[0029] Also contemplated are nucleic acid molecules that hybridize to the polynucleotides of the present invention at lower stringency hybridization conditions. Changes in the stringency of hybridization and signal detection are primarily accomplished through the manipulation of formamide concentration (lower percentages of formamide result in lowered stringency); salt conditions, or temperature. For example, lower stringency conditions include an overnight incubation at 37 degree C. in a solution comprising 6×SSPE (20×SSPE=3M NaCl; 0.2M NaH₂PO₄; 0.02M EDTA, pH 7.4), 0.5% SDS, 30% formamide, 100 ug/ml salmon sperm blocking DNA; followed by washes at 50 degree C. with 1×SSPE, 0.1% SDS. In addition, to achieve even lower stringency, washes performed following stringent hybridization can be done at higher salt concentrations (e.g. 5×SSC).

[0030] Note that variations in the above conditions may be accomplished through the inclusion and/or substitution of alternate blocking reagents used to suppress background in hybridization experiments. Typical blocking reagents include Denhardt's reagent, BLOTTO, heparin, denatured salmon sperm DNA, and commercially available proprietary formulations. The inclusion of specific blocking reagents may require modification of the hybridization conditions described above, due to problems with compatibility.

[0031] Of course, a polynucleotide which hybridizes only to polyA+ sequences (such as any 3′ terminal polyA+ tract of a cDNA shown in the sequence listing), or to a complementary stretch of T (or U) residues, would not be included in the definition of “polynucleotide,” since such a polynucleotide would hybridize to any nucleic acid molecule containing a poly (A) stretch or the complement thereof (e.g., practically any double-stranded cDNA clone generated using oligo dT as a primer).

[0032] The polynucleotide of the present invention can be composed of any polyribonucleotide or polydeoxribonucleotide, which may be unmodified RNA or DNA or modified RNA or DNA. For example, polynucleotides can be composed of single- and double-stranded DNA, DNA that is a mixture of single- and double-stranded regions, single- and double-stranded RNA, and RNA that is mixture of single- and double-stranded regions, hybrid molecules comprising DNA and RNA that may be single-stranded or, more typically, double-stranded or a mixture of single- and double-stranded regions. In addition, the polynucleotide can be composed of triple-stranded regions comprising RNA or DNA or both RNA and DNA. A polynucleotide may also contain one or more modified bases or DNA or RNA backbones modified for stability or for other reasons. “Modified” bases include, for example, tritylated bases and unusual bases such as inosine. A variety of modifications can be made to DNA and RNA; thus, “polynucleotide” embraces chemically, enzymatically, or metabolically modified forms.

[0033] The polypeptide of the present invention can be composed of amino acids joined to each other by peptide bonds or modified peptide bonds, i.e., peptide isosteres, and may contain amino acids other than the 20 gene-encoded amino acids. The polypeptides may be modified by either natural processes, such as posttranslational processing, or by chemical modification techniques which are well known in the art. Such modifications are well described in basic texts and in more detailed monographs, as well as in a voluminous research literature. Modifications can occur anywhere in a polypeptide, including the peptide backbone, the amino acid side-chains and the amino or carboxyl termini. It will be appreciated that the same type of modification may be present in the same or varying degrees at several sites in a given polypeptide. Also, a given polypeptide may contain many types of modifications. Polypeptides may be branched, for example, as a result of ubiquitination, and they may be cyclic, with or without branching. Cyclic, branched, and branched cyclic polypeptides may result from posttranslation natural processes or may be made by synthetic methods. Modifications include acetylation, acylation, ADP-ribosylation, amidation, covalent attachment of flavin, covalent attachment of a heme moiety, covalent attachment of a nucleotide or nucleotide derivative, covalent attachment of a lipid or lipid derivative, covalent attachment of phosphotidylinositol, cross-linking, cyclization, disulfide bond formation, demethylation, formation of covalent cross-links, formation of cysteine, formation of pyroglutamate, formylation, gamma-carboxylation, glycosylation, GPI anchor formation, hydroxylation, iodination, methylation, myristoylation, oxidation, pegylation, proteolytic processing, phosphorylation, prenylation, racemization, selenoylation, sulfation, transfer-RNA mediated addition of amino acids to proteins such as arginylation, and ubiquitination. (See, for instance, PROTEINS—STRUCTURE AND MOLECULAR PROPERTIES, 2nd Ed., T. E. Creighton, W. H. Freeman and Company, New York (1993); POSTTRANSLATIONAL COVALENT MODIFICATION OF PROTEINS, B. C. Johnson, Ed., Academic Press, New York, pgs. 1-12 (1983); Seifter et al., Meth. Enzymol. 182:626-646 (1990); Rattan et al., Ann. N.Y. Acad. Sci. 663:48-62 (1992)).

[0034] “SEQ ID NO:X” refers to a polynucleotide sequence described, for example, in Tables 1A or 2, while “SEQ ID NO:Y” refers to a polypeptide sequence described in column 6 of Table 1A. SEQ ID NO:X is identified by an integer specified in column 4 of Table 1A. The polypeptide sequence SEQ ID NO:Y is a translated open reading frame (ORF) encoded by polynucleotide SEQ ID NO:X. “Clone ID NO:Z” refers to a cDNA clone described in column 2 of Table 1A.

[0035] “A polypeptide having functional activity” refers to a polypeptide capable of displaying one or more known functional activities associated with a full-length (complete) protein. Such functional activities include, but are not limited to, biological activity, antigenicity [ability to bind (or compete with a polypeptide for binding) to an anti-polypeptide antibody], immunogenicity (ability to generate antibody which binds to a specific polypeptide of the invention), ability to form multimers with polypeptides of the invention, and ability to bind to a receptor or ligand for a polypeptide.

[0036] The polypeptides of the invention can be assayed for functional activity (e.g. biological activity) using or routinely modifying assays known in the art, as well as assays described herein. Specifically, one of skill in the art may routinely assay nervous system polypeptides (including fragments and variants) of the invention for activity using assays as described in Examples 24, 34, 37, 48, and 59.

[0037] “A polypeptide having biological activity” refers to a polypeptide exhibiting activity similar to, but not necessarily identical to, an activity of a polypeptide of the present invention, including mature forms, as measured in a particular biological assay, with or without dose dependency. In the case where dose dependency does exist, it need not be identical to that of the polypeptide, but rather substantially similar to the dose-dependence in a given activity as compared to the polypeptide of the present invention (i.e., the candidate polypeptide will exhibit greater activity or not more than about 25-fold less and, preferably, not more than about tenfold less activity, and most preferably, not more than about three-fold less activity relative to the polypeptide of the present invention).

[0038] Table 1A summarizes some of the polynucleotides encompassed by the invention (including contig sequences (SEQ ID NO:X) and clones (Clone ID NO:Z) and further summarizes certain characteristics of these polynucleotides and the polypeptides encoded thereby.

[0039] Polynucleotides and Polypeptides of the Invention

TABLE 1A

| | | | | | AA | | Tissue Distribution | | |
|---|---|---|---|---|---|---|---|---|---|
| | | | | | SEQ | | Library code: count | | OMIM |
| Gene | | Contig | SEQ ID | ORF | ID | | (see Table IV for Library | Cytologic | Disease |
| No: | Clone ID NO: Z | ID: | NO: X | (From-To) | NO: Y | Predicted Epitopes | Codes) | Band | Reference(s): |
| 1 | HTPAD46 | 1048901 | 11 | 1567-1148 | 609 | | AR061: 0, AR089: 0 | | |
| | | | | | | | L0794: 4, H0039: 2, | | |
| | | | | | | | S0358: 1, H0013: 1, | | |
| | | | | | | | H0575: 1, L0770: 1, | | |
| | | | | | | | L0769: 1 and L0749: 1. | | |
| | | 503313 | 335 | 103-309 | 933 | His-50 to Leu-69. | | | |
| 2 | HCWFF88 | 1092566 | 12 | 628-227 | 610 | | AR089: 15, AR061: 6 | | |
| | | | | | | | H0305: 2 | | |
| | | 506577 | 336 | 41-187 | 934 | Pro-1 to Gly-6, | | | |
| | | | | | | Ala-41 to Leu-47. | | | |
| 3 | HSSAX53 | 1198889 | 13 | 209-361 | 611 | | H0135: 1 and H0063: | | |
| | | | | | | | 1. | | |
| | | 507509 | 337 | 209-361 | 935 | | | | |
| 4 | HCEPH71 | 522739 | 14 | 3-410 | 612 | Val-1 to Lys-8, | AR089: 1, AR061: 1 | | |
| | | | | | | Pro-36 to Lys-41, | H0052: 1 and T0067: | | |
| | | | | | | Gln-49 to Lys-57, | 1. | | |
| | | | | | | Ser-63 to Ser-70, | | | |
| | | | | | | Asp-79 to Gln-92, | | | |
| | | | | | | Asn-103 to Thr-122. | | | |
| 5 | HTEDF74 | 1083405 | 15 | 2-970 | 613 | Pro-37 to Trp-53, | AR061: 3, AR089: 2 | | |
| | | | | | | Arg-56 to Pro-62. | L0731: 2, H0341: 1, | | |
| | | | | | | | H0392: 1, H0038: 1, | | |
| | | | | | | | H0641: 1, L0803: 1 and | | |
| | | | | | | | H0445: 1. | | |
| | | 522982 | 338 | 3-575 | 936 | Pro-20 to Trp-36, | | | |
| | | | | | | Arg-39 to Pro-45, | | | |
| | | | | | | Gly-62 to Glu-69, | | | |
| | | | | | | Asp-77 to Lys-82, | | | |
| | | | | | | Pro-87 to Ala-93. | | | |
| 6 | HTTEK47 | 1134534 | 16 | 2-1009 | 614 | Val-21 to Pro-27. | AR061: 8, AR089: 6 | | |
| | | | | | | | L0439: 5, H0622: 3, | | |
| | | | | | | | H0040: 2, L0794: 2, | | |
| | | | | | | | L0805: 2, L0758: 2, | | |
| | | | | | | | L0803: 1, L0375: 1, | | |
| | | | | | | | L0659: 1, L0789: 1, | | |
| | | | | | | | L0665: 1, H0579: 1, | | |
| | | | | | | | L0750: 1, L0779: 1, | | |
| | | | | | | | L0777: 1, L0752: 1 and | | |
| | | | | | | | L0755: 1. | | |
| | | 573649 | 339 | 2-349 | 937 | Leu-13 to Val-18, | | | |
| | | | | | | Thr-37 to Lys-46. | | | |
| 7 | HTOBE75 | 1163883 | 17 | 149-1075 | 615 | Arg-36 to Gln-44, | AR061: 2, AR089: 1 | | |
| | | | | | | Ser-49 to Gln-57, | H0038: 3, L0748: 3, | | |
| | | | | | | Lys-276 to Cys-286. | L0659: 2, L0743: 2, | | |
| | | | | | | | L0744: 2, H0486: 1, | | |
| | | | | | | | H0421: 1, H0024: 1, | | |
| | | | | | | | H0031: 1, H0272: 1, | | |
| | | | | | | | L0662: 1, L0384: 1, | | |
| | | | | | | | L0809: 1 and L0779: 1. | | |
| | | 591896 | 340 | 1-414 | 938 | | | | |
| 8 | HCFAT05 | 1156310 | 18 | 1-747 | 616 | Leu-21 to Gln-29, | AR061: 1, AR089: 1 | | |
| | | | | | | Ala-95 to Gly-101, | H0556: 2, H0634: 1, | | |
| | | | | | | Arg-163 to Gln-172, | L0766: 1 and H0422: 1. | | |
| | | | | | | Ser-183 to Glu-202, | | | |
| | | | | | | Thr-219 to Ser-226, | | | |
| | | | | | | Thr-231 to Ser-238. | | | |
| | | 592118 | 341 | 2-490 | 939 | Arg-1 to His-11, | | | |
| | | | | | | Ser-18 to Gly-27, | | | |
| | | | | | | Gly-36 to Gly-44, | | | |
| | | | | | | Asp-97 to Phe-103, | | | |
| | | | | | | Pro-127 to Gly-132. | | | |
| 9 | HFIAH37 | 1189001 | 19 | 69-872 | 617 | Lys-65 to Thr-71, | AR089: 7, AR061: 1 | | |
| | | | | | | Lys-104 to Gly-109, | H0457: 2, H0529: 2, | | |
| | | | | | | Lys-116 to His-122, | H0561: 1, H0521: 1, | | |
| | | | | | | Asn-140 to Asp-146, | S0192: 1 and L0600: 1. | | |
| | | | | | | Lys-184 to Lys-203, | | | |
| | | | | | | Glu-205 to Asn-239, | | | |
| | | | | | | Ala-256 to Phe-267. | | | |
| | | 615597 | 342 | 70-375 | 940 | Lys-65 to Thr-71. | | | |
| 10 | HFTDF15 | 1084887 | 20 | 475-672 | 618 | | AR089: 3, AR061: 2 | | |
| | | | | | | | H0563: 1 and H0123: | | |
| | | | | | | | 1. | | |
| | | 657020 | 343 | 129-254 | 941 | | | | |
| 11 | HPFCU80 | 1017593 | 21 | 341-3 | 619 | | AR089: 16, AR061: 13 | | |
| | | | | | | | H0163: 3 and H0169: | | |
| | | | | | | | 1. | | |
| | | 685294 | 344 | 162-341 | 942 | | | | |
| 12 | HSVAW49 | 1153916 | 22 | 767-501 | 620 | Pro-19 to Thr-24, | AR061: 9, AR089: 7 | | |
| | | | | | | Thr-78 to Lys-89. | H0309: 1 | | |
| | | 689674 | 345 | 44-208 | 943 | Glu-21 to Glu-27. | | | |
| 13 | HWHQC94 | 1116463 | 23 | 2-916 | 621 | | AR089: 2, AR061: 1 | | |
| | | | | | | | L0665: 4, S0132: 2, | | |
| | | | | | | | L0438: 2, L0439: 2, | | |
| | | | | | | | L0596: 2, H0542: 2, | | |
| | | | | | | | H0543: 2, S0114: 1, | | |
| | | | | | | | H0614: 1, H0592: 1, | | |
| | | | | | | | H0587: 1, S0280: 1, | | |
| | | | | | | | H0253: 1, H0581: 1, | | |
| | | | | | | | H0457: 1, H0012: 1, | | |
| | | | | | | | H0083: 1, H0687: 1, | | |
| | | | | | | | H0290: 1, H0622: 1, | | |
| | | | | | | | H0135: 1, S0150: 1, | | |
| | | | | | | | L0796: 1, L0646: 1, | | |
| | | | | | | | L0643: 1, L0764: 1, | | |
| | | | | | | | L0773: 1, L0649: 1, | | |
| | | | | | | | L0659: 1, L0663: 1, | | |
| | | | | | | | H0658: 1, H0555: 1, | | |
| | | | | | | | H0478: 1, L0752: 1, | | |
| | | | | | | | L0599: 1 and H0506: 1. | | |
| | | 715096 | 346 | 1-627 | 944 | Trp-62 to Pro-67. | | | |
| 14 | HRSMD49 | 1065458 | 24 | 166-342 | 622 | Phe-16 to Trp-24, | AR089: 3, AR061: 2 | | |
| | | | | | | Leu-30 to Val-37, | H0394: 1 and L0589: | | |
| | | | | | | Phe-41 to Ile-49. | 1. | | |
| | | 723025 | 347 | 190-456 | 945 | Gln-36 to Ile-46, | | | |
| | | | | | | Ser-55 to Phe-65, | | | |
| | | | | | | Ser-67 to Lys-78. | | | |
| 15 | HFTDY67 | 1151220 | 25 | 1527-1 | 623 | Asn-64 to Pro-73, | AR089: 89, AR061: 75 | | |
| | | | | | | Asp-83 to Glu-94, | S0002: 2, H0521: 2, | | |
| | | | | | | Leu-144 to Pro-153, | S0360: 1, H0123: 1, | | |
| | | | | | | Glu-162 to Thr-167, | S0250: 1, L0654: 1, | | |
| | | | | | | Asp-178 to Ser-189, | S0152: 1, L0740: 1 and | | |
| | | | | | | Gly-197 to Leu-210, | L0749: 1. | | |
| | | | | | | Pro-217 to Pro-222, | | | |
| | | | | | | Arg-234 to Asp-251, | | | |
| | | | | | | Gly-279 to Phe-293, | | | |
| | | | | | | Asp-357 to Gly-367, | | | |
| | | | | | | Gly-379 to Val-396, | | | |
| | | | | | | Glu-421 to Met-426, | | | |
| | | | | | | Asn-441 to Leu-447, | | | |
| | | | | | | Glu-467 to Trp-474. | | | |
| | | 745221 | 348 | 1-228 | 946 | Gly-23 to Phe-37. | | | |
| 16 | HYABL89 | 1090733 | 26 | 247-417 | 624 | | AR089: 1, AR061: 1 | | |
| | | | | | | | S0114: 1, H0583: 1 and | | |
| | | | | | | | H0013: 1. | | |
| | | 786157 | 349 | 246-416 | 947 | | | | |
| 17 | HCUEV29 | 1137791 | 27 | 3-569 | 625 | Glu-18 to Val-28, | AR089: 1, AR061: 1 | | |
| | | | | | | Pro-31 to Glu-47, | H0457: 15, H0271: 11, | | |
| | | | | | | Glu-88 to Asp-94, | H0494: 7, H0521: 7, | | |
| | | | | | | Ser-154 to Lys-178. | H0141: 6, H0255: 6, | | |
| | | | | | | | S0434: 6, L0758: 5, | | |
| | | | | | | | S0354: 4, S0358: 4, | | |
| | | | | | | | S0278: 4, H0179: 4, | | |
| | | | | | | | L0771: 4, L0783: 4, | | |
| | | | | | | | H0436: 4, H0556: 3, | | |
| | | | | | | | H0069: 3, H0618: 3, | | |
| | | | | | | | L0776: 3, L0659: 3, | | |
| | | | | | | | H0435: 3, H0661: 2, | | |
| | | | | | | | S0418: 2, S0420: 2, | | |
| | | | | | | | H0580: 2, S0222: 2, | | |
| | | | | | | | H0486: 2, H0013: 2, | | |
| | | | | | | | H0581: 2, H0083: 2, | | |
| | | | | | | | H0266: 2, S0003: 2, | | |
| | | | | | | | H0424: 2, S0036: 2, | | |
| | | | | | | | H0090: 2, H0038: 2, | | |
| | | | | | | | H0634: 2, H0616: 2, | | |
| | | | | | | | S0344: 2, S0002: 2, | | |
| | | | | | | | L0770: 2, L0646: 2, | | |
| | | | | | | | L0662: 2, L0381: 2, | | |
| | | | | | | | L0655: 2, L0809: 2, | | |
| | | | | | | | L0666: 2, L0665: 2, | | |
| | | | | | | | S0216: 2, H0703: 2, | | |
| | | | | | | | H0547: 2, H0593: 2, | | |
| | | | | | | | H0670: 2, H0539: 2, | | |
| | | | | | | | S0027: 2, L0748: 2, | | |
| | | | | | | | L0439: 2, L0751: 2, | | |
| | | | | | | | L0591: 2, H0543: 2, | | |
| | | | | | | | H0624: 1, H0650: 1, | | |
| | | | | | | | H0656: 1, S0116: 1, | | |
| | | | | | | | H0484: 1, H0402: 1, | | |
| | | | | | | | S0376: 1, S0444: 1, | | |
| | | | | | | | S0360: 1, S0045: 1, | | |
| | | | | | | | S0046: 1, H0619: 1, | | |
| | | | | | | | S6026: 1, H0261: 1, | | |
| | | | | | | | H0438: 1, H0586: 1, | | |
| | | | | | | | H0559: 1, H0101: 1, | | |
| | | | | | | | H0427: 1, H0036: 1, | | |
| | | | | | | | T0048: 1, H0318: 1, | | |
| | | | | | | | S0474: 1, H0421: 1, | | |
| | | | | | | | H0052: 1, H0205: 1, | | |
| | | | | | | | H0231: 1, L0738: 1, | | |
| | | | | | | | H0150: 1, H0081: 1, | | |
| | | | | | | | T0010: 1, H0416: 1, | | |
| | | | | | | | T0006: 1, H0213: 1, | | |
| | | | | | | | H0598: 1, H0135: 1, | | |
| | | | | | | | H0040: 1, H0087: 1, | | |
| | | | | | | | H0264: 1, H0488: 1, | | |
| | | | | | | | H0623: 1, H0334: 1, | | |
| | | | | | | | H0561: 1, S0440: 1, | | |
| | | | | | | | L0369: 1, L0769: 1, | | |
| | | | | | | | L0667: 1, L0773: 1, | | |
| | | | | | | | L0648: 1, L0364: 1, | | |
| | | | | | | | L0766: 1, L0649: 1, | | |
| | | | | | | | L0375: 1, L0378: 1, | | |
| | | | | | | | L0806: 1, L0653: 1, | | |
| | | | | | | | L0657: 1, L0636: 1, | | |
| | | | | | | | S0052: 1, S0428: 1, | | |
| | | | | | | | H0702: 1, S0374: 1, | | |
| | | | | | | | L0438: 1, S0328: 1, | | |
| | | | | | | | S0330: 1, H0710: 1, | | |
| | | | | | | | S0146: 1, S0406: 1, | | |
| | | | | | | | H0576: 1, H0631: 1, | | |
| | | | | | | | S3014: 1, L0779: 1, | | |
| | | | | | | | L0759: 1, H0445: 1, | | |
| | | | | | | | S0436: 1, S0011: 1, | | |
| | | | | | | | S0026: 1, S0242: 1 and | | |
| | | | | | | | H0506: 1. | | |
| | | 816065 | 350 | 2-298 | 948 | | | | |
| 18 | HCESP56 | 1121751 | 28 | 452-72 | 626 | Glu-1 to Leu-6, | AR061: 8, AR089: 5 | | |
| | | | | | | Asp-90 to Asp-107. | H0052: 3, S0282: 1, | | |
| | | | | | | | H0194: 1, H0009: 1, | | |
| | | | | | | | L0789: 1, L0602: 1 and | | |
| | | | | | | | L0439: 1. | | |
| | | 827671 | 351 | 147-512 | 949 | Asp-15 to Thr-21, | | | |
| | | | | | | Gln-83 to Ile-91. | | | |
| 19 | HLQDT35 | 1154064 | 29 | 230-502 | 627 | Ile-1 to Ser-6, | AR089: 3, AR061: 3 | | |
| | | | | | | Leu-81 to Glu-91. | S0358: 8, L0766: 7, | | |
| | | | | | | | L0777: 7, L0731: 7, | | |
| | | | | | | | L0659: 4, L0748: 4, | | |
| | | | | | | | L0751: 4, L0783: 3, | | |
| | | | | | | | L0663: 3, S0418: 2, | | |
| | | | | | | | S0360: 2, H0486: 2, | | |
| | | | | | | | S0010: 2, S0250: 2, | | |
| | | | | | | | S0422: 2, L0763: 2, | | |
| | | | | | | | L0803: 2, L0775: 2, | | |
| | | | | | | | L0789: 2, H0520: 2, | | |
| | | | | | | | L0756: 2, L0752: 2, | | |
| | | | | | | | H0656: 1, S0376: 1, | | |
| | | | | | | | H0208: 1, H0574: 1, | | |
| | | | | | | | H0632: 1, S0414: 1, | | |
| | | | | | | | H0581: 1, H0052: 1, | | |
| | | | | | | | H0024: 1, H0014: 1, | | |
| | | | | | | | H0355: 1, H0688: 1, | | |
| | | | | | | | H0090: 1, H0623: 1, | | |
| | | | | | | | H0509: 1, H0529: 1, | | |
| | | | | | | | L0520: 1, L0761: 1, | | |
| | | | | | | | L0650: 1, L0809: 1, | | |
| | | | | | | | L0666: 1, L0665: 1, | | |
| | | | | | | | S0126: 1, H0684: 1, | | |
| | | | | | | | H0648: 1, S0390: 1, | | |
| | | | | | | | L0740: 1, L0745: 1, | | |
| | | | | | | | L0749: 1, L0750: 1, | | |
| | | | | | | | L0755: 1, L0591: 1, | | |
| | | | | | | | L0362: 1 and S0242: 1. | | |
| | | 839777 | 352 | 222-494 | 950 | | | | |
| 20 | HDPBS64 | 846624 | 30 | 2-685 | 628 | Phe-7 to Pro-15, | AR089: 1, AR061: 0 | | |
| | | | | | | Trp-34 to Gly-40. | S0222: 1, S0002: 1, | | |
| | | | | | | | L0804: 1, L0663: 1 and | | |
| | | | | | | | H0521: 1. | | |
| 21 | HTBAB41 | 1052388 | 31 | 619-798 | 629 | Met-1 to Ser-8. | AR089: 30, AR061: 8 | | |
| | | | | | | | S0044: 2, L0748: 2, | | |
| | | | | | | | H0392: 1, H0075: 1, | | |
| | | | | | | | L0770: 1 and H0519: 1. | | |
| | | 867287 | 353 | 11-178 | 951 | Lys-1 to Asp-7, | | | |
| | | | | | | Gln-47 to Arg-53. | | | |
| 22 | HTLGE31 | 870247 | 32 | 2-307 | 630 | Val-47 to Gly-65. | AR089: 163, AR061: | | |
| | | | | | | | 32 | | |
| | | | | | | | H0618: 1, L0368: 1 | | |
| | | | | | | | and S0053: 1. | | |
| 23 | HWLHK29 | 1152279 | 33 | 3-608 | 631 | Gln-24 to Thr-32, | AR089: 15, AR061: 5 | | |
| | | | | | | Ser-154 to Phe-163. | L0754: 5, L0755: 5, | | |
| | | | | | | | S0354: 3, L0483: 3, | | |
| | | | | | | | H0648: 3, L0777: 3, | | |
| | | | | | | | S0374: 2, L0751: 2, | | |
| | | | | | | | L0758: 2, L0605: 2, | | |
| | | | | | | | L0362: 2, H0543: 2, | | |
| | | | | | | | S0114: 1, S0358: 1, | | |
| | | | | | | | H0411: 1, H0575: 1, | | |
| | | | | | | | L0105: 1, H0263: 1, | | |
| | | | | | | | H0596: 1, H0510: 1, | | |
| | | | | | | | S0003: 1, H0166: 1, | | |
| | | | | | | | H0169: 1, H0090: 1, | | |
| | | | | | | | H0059: 1, S0440: 1, | | |
| | | | | | | | L0373: 1, L0372: 1, | | |
| | | | | | | | L0800: 1, L0662: 1, | | |
| | | | | | | | L0794: 1, L0649: 1, | | |
| | | | | | | | L0803: 1, L0804: 1, | | |
| | | | | | | | L0659: 1, L0783: 1, | | |
| | | | | | | | L0809: 1, L0789: 1, | | |
| | | | | | | | L0790: 1, L0666: 1, | | |
| | | | | | | | L0665: 1, S0378: 1, | | |
| | | | | | | | L0602: 1, H0436: 1, | | |
| | | | | | | | L0779: 1, L0780: 1, | | |
| | | | | | | | S0434: 1, S0196: 1 and | | |
| | | | | | | | S0446: 1. | | |
| | | 876064 | 354 | 3-491 | 952 | Gln-18 to Thr-26. | | | |
| 24 | HHEGG20 | 1106816 | 34 | 3-971 | 632 | Arg-4 to Glu-12, | AR089: 2, AR061: 1 | | |
| | | | | | | Glu-121 to Gly-126, | S0360: 1, H0013: 1, | | |
| | | | | | | Ala-141 to Pro-146, | L0664: 1 and H0542: 1. | | |
| | | | | | | Gln-161 to Phe-176, | | | |
| | | | | | | Lys-186 to Ser-194. | | | |
| | | 894409 | 355 | 26-820 | 953 | | | | |
| 25 | HDPRU43 | 1217035 | 35 | 1-2460 | 633 | Pro-1 to Gly-7, | AR089: 1, AR061: 1 | | |
| | | | | | | Val-127 to Val-133, | H0046: 34, L0731: 5, | | |
| | | | | | | Leu-162 to Ser-171, | L0534: 4, L0769: 4, | | |
| | | | | | | Arg-178 to Glu-185, | H0521: 4, S0356: 3, | | |
| | | | | | | Pro-195 to Thr-200, | L0800: 3, L0794: 3, | | |
| | | | | | | Gln-243 to Trp-248, | L0439: 3, L0749: 3, | | |
| | | | | | | Gln-252 to Asn-265, | L0752: 3, L0759: 3, | | |
| | | | | | | Glu-313 to Cys-319, | L0562: 2, H0486: 2, | | |
| | | | | | | His-417 to Glu-422, | L0803: 2, L0805: 2, | | |
| | | | | | | Arg-464 to Ala-473, | L0809: 2, L0789: 2, | | |
| | | | | | | Met-530 to Lys-538, | L0744: 2, L0485: 2, | | |
| | | | | | | Arg-594 to Gly-599, | H0556: 1, H0657: 1, | | |
| | | | | | | Glu-641 to Gly-649, | H0637: 1, H0580: 1, | | |
| | | | | | | Asp-660 to Ala-668, | H0208: 1, H0261: 1, | | |
| | | | | | | Arg-705 to Ser-727, | H0609: 1, H0455: 1, | | |
| | | | | | | Ser-777 to Glu-783, | H0600: 1, H0586: 1, | | |
| | | | | | | Leu-796 to Gly-806. | H0331: 1, H0635: 1, | | |
| | | | | | | | H0618: 1, H0544: 1, | | |
| | | | | | | | H0009: 1, H0050: 1, | | |
| | | | | | | | H0620: 1, H0288: 1, | | |
| | | | | | | | S0312: 1, S0314: 1, | | |
| | | | | | | | H0252: 1, H0688: 1, | | |
| | | | | | | | H0644: 1, S0366: 1, | | |
| | | | | | | | H0135: 1, H0063: 1, | | |
| | | | | | | | H0087: 1, H0551: 1, | | |
| | | | | | | | H0264: 1, S0002: 1, | | |
| | | | | | | | L0639: 1, L0771: 1, | | |
| | | | | | | | L0648: 1, L0766: 1, | | |
| | | | | | | | L0650: 1, L0378: 1, | | |
| | | | | | | | L0655: 1, H0699: 1, | | |
| | | | | | | | H0660: 1, L0743: 1, | | |
| | | | | | | | L0750: 1, L0777: 1, | | |
| | | | | | | | L0758: 1, L0097: 1, | | |
| | | | | | | | S0194: 1 and H0543: 1. | | |
| | | 909841 | 356 | 1-342 | 954 | Pro-8 to Gln-16. | | | |
| 26 | HE8PK12 | 1227647 | 36 | 2-367 | 634 | Val-30 to Ser-37. | AR089: 6, AR061: 4 | | |
| | | | | | | | L0754: 6, L0777: 6, | | |
| | | | | | | | L0740: 5, L0731: 4, | | |
| | | | | | | | L0758: 4, L0759: 4, | | |
| | | | | | | | S0001: 3, S0280: 3, | | |
| | | | | | | | L0770: 3, L0764: 3, | | |
| | | | | | | | L0747: 3, L0749: 3, | | |
| | | | | | | | L0366: 3, S0412: 3, | | |
| | | | | | | | S0007: 2, H0411: 2, | | |
| | | | | | | | H0013: 2, L0471: 2, | | |
| | | | | | | | T0004: 2, L0598: 2, | | |
| | | | | | | | L0638: 2, L0662: 2, | | |
| | | | | | | | L0783: 2, L0438: 2, | | |
| | | | | | | | H0696: 2, L0744: 2, | | |
| | | | | | | | L0748: 2, L0751: 2, | | |
| | | | | | | | L0745: 2, L0779: 2, | | |
| | | | | | | | L0752: 2, H0170: 1, | | |
| | | | | | | | S0282: 1, H0662: 1, | | |
| | | | | | | | H0574: 1, T0060: 1, | | |
| | | | | | | | H0427: 1, H0590: 1, | | |
| | | | | | | | S0010: 1, L0105: 1, | | |
| | | | | | | | S0049: 1, H0194: 1, | | |
| | | | | | | | H0373: 1, L0163: 1, | | |
| | | | | | | | H0201: 1, H0031: 1, | | |
| | | | | | | | H0553: 1, S0306: 1, | | |
| | | | | | | | L0776: 1, L0659: 1, | | |
| | | | | | | | L0526: 1, L0809: 1, | | |
| | | | | | | | L0663: 1, H0144: 1, | | |
| | | | | | | | H0547: 1, H0648: 1, | | |
| | | | | | | | H0672: 1, L0743: 1, | | |
| | | | | | | | L0780: 1, S0031: 1, | | |
| | | | | | | | H0343: 1, L0604: 1 and | | |
| | | | | | | | H0653: 1. | | |
| | | 909884 | 357 | 2-367 | 955 | Val-30 to Ser-37, | | | |
| | | | | | | Gln-43 to Asp-62, | | | |
| | | | | | | Pro-74 to Glu-79, | | | |
| | | | | | | Thr-102 to Phe-109. | | | |
| 27 | HE9HV92 | 1227519 | 37 | 1-1050 | 635 | Asn-2 to Gly-10, | AR061: 1, AR089: 0 | | |
| | | | | | | Asp-86 to Ile-110, | L0439: 3, H0616: 2, | | |
| | | | | | | Gly-116 to Gln-121, | L0749: 2, S0420: 1, | | |
| | | | | | | Ala-135 to Arg-140, | H0415: 1, H0013: 1, | | |
| | | | | | | Ala-167 to Ser-172, | H0590: 1, S0010: 1, | | |
| | | | | | | Leu-176 to Lys-183. | H0046: 1, H0050: 1, | | |
| | | | | | | | H0375: 1, H0615: 1, | | |
| | | | | | | | S0366: 1, H0529: 1, | | |
| | | | | | | | H0144: 1, S0126: 1, | | |
| | | | | | | | S0152: 1, S3014: 1 and | | |
| | | | | | | | L0779: 1. | | |
| | | 911510 | 358 | 2-1048 | 956 | Thr-1 to Gly-9. | | | |
| 28 | HOHCE47 | 1217059 | 38 | 578-2143 | 636 | Tyr-83 to Ser-92, | AR061: 1, AR089: 0 | | |
| | | | | | | Leu-118 to Tyr-123, | S0040: 1, H0580: 1, | | |
| | | | | | | Leu-137 to Ser-143, | S0222: 1, H0355: 1, | | |
| | | | | | | Gln-148 to Ser-158, | S0250: 1, L0565: 1 and | | |
| | | | | | | Thr-258 to Pro-266, | S0152: 1. | | |
| | | | | | | Gln-274 to His-283, | | | |
| | | | | | | Asp-325 to Ser-334, | | | |
| | | | | | | Gln-343 to Thr-349, | | | |
| | | | | | | Ser-366 to Val-378, | | | |
| | | | | | | Arg-381 to Asp-388, | | | |
| | | | | | | Pro-426 to Asn-431, | | | |
| | | | | | | Cys-446 to Ser-457, | | | |
| | | | | | | Leu-469 to Lys-486, | | | |
| | | | | | | Cys-501 to Arg-510. | | | |
| | | 911566 | 359 | 1-429 | 957 | Gly-1 to Trp-6. | | | |
| 29 | HSDII69 | 1154067 | 39 | 74-412 | 637 | His-13 to Gly-21, | AR061: 6, AR089: 5 | | |
| | | | | | | Tyr-61 to Asp-66, | H0328: 4, H0031: 3, | | |
| | | | | | | Ala-105 to Thr-110. | L0519: 3, L0748: 2, | | |
| | | | | | | | L0777: 2, L0731: 2, | | |
| | | | | | | | S0260: 2, H0624: 1, | | |
| | | | | | | | S6024: 1, H0650: 1, | | |
| | | | | | | | S0116: 1, H0254: 1, | | |
| | | | | | | | S0007: 1, H0393: 1, | | |
| | | | | | | | H0441: 1, H0438: 1, | | |
| | | | | | | | H0574: 1, H0156: 1, | | |
| | | | | | | | H0599: 1, S0051: 1, | | |
| | | | | | | | H0615: 1, H0039: 1, | | |
| | | | | | | | L0564: 1, L0763: 1, | | |
| | | | | | | | L0766: 1, L0774: 1, | | |
| | | | | | | | L0776: 1, L0659: 1, | | |
| | | | | | | | L0518: 1, L0792: 1, | | |
| | | | | | | | L0666: 1, L0663: 1, | | |
| | | | | | | | S0242: 1 and H0423: 1. | | |
| | | 917180 | 360 | 202-540 | 958 | His-13 to Gly-21, | | | |
| | | | | | | Tyr-61 to Asp-66, | | | |
| | | | | | | Ala-105 to Thr-110. | | | |
| 30 | HKAKM10 | 1227639 | 40 | 3-2840 | 638 | Leu-15 to Ser-21, | AR089: 1, AR061: 1 | | |
| | | | | | | Leu-89 to Tyr-94, | L0794: 4, L0438: 4, | | |
| | | | | | | Gly-130 to Gln-136, | L0761: 3, L0766: 3, | | |
| | | | | | | Asn-163 to Leu-168, | L0748: 3, L0439: 3, | | |
| | | | | | | Lys-176 to His-181, | H0556: 2, L0602: 2, | | |
| | | | | | | Ile-187 to Arg-193, | L0754: 2, L0779: 2, | | |
| | | | | | | Ala-239 to Thr-244, | H0580: 1, H0208: 1, | | |
| | | | | | | Pro-263 to Val-268, | H0013: 1, T0082: 1, | | |
| | | | | | | Ala-401 to Ser-406. | S0010: 1, H0428: 1, | | |
| | | | | | | | H0553: 1, H0038: 1, | | |
| | | | | | | | H0616: 1, H0494: 1, | | |
| | | | | | | | L0796: 1, L0800: 1, | | |
| | | | | | | | L0773: 1, L0533: 1, | | |
| | | | | | | | L0803: 1, L0776: 1, | | |
| | | | | | | | L0657: 1, L0791: 1, | | |
| | | | | | | | H0520: 1, H0519: 1, | | |
| | | | | | | | H0521: 1, H0187: 1, | | |
| | | | | | | | L0731: 1, S0031: 1 and | | |
| | | | | | | | L0366: 1. | | |
| | | 918685 | 361 | 2-547 | 959 | Gly-25 to Gln-31, | | | |
| | | | | | | Asn-58 to Leu-63, | | | |
| | | | | | | Lys-71 to His-76, | | | |
| | | | | | | Ile-82 to Arg-88, | | | |
| | | | | | | Ala-134 to Thr-139. | | | |
| 31 | HCEPU56 | 1226120 | 41 | 1037-1840 | 639 | Lys-65 to Thr-71, | AR061: 6, AR089: 5 | | |
| | | | | | | Lys-104 to Gly-109, | | | |
| | | | | | | Lys-116 to His-122, | | | |
| | | | | | | Asn-140 to Asp-146, | | | |
| | | | | | | Lys-184 to Lys-203, | | | |
| | | | | | | Glu-205 to Asn-239, | | | |
| | | | | | | Ala-256 to Phe-267. | | | |
| | | 920347 | 362 | 219-593 | 960 | Lys-16 to Thr-22, | | | |
| | | | | | | Lys-55 to Gly-60, | | | |
| | | | | | | Lys-67 to His-73, | | | |
| | | | | | | Asn-91 to Asp-97. | | | |
| 32 | HUSHB54 | 928054 | 42 | 125-355 | 640 | | AR089: 1, AR061: 0 | | |
| | | | | | | | H0056: 3, H0437: 1, | | |
| | | | | | | | H0050: 1 and S0002: 1. | | |
| 33 | HLMDO95 | 928344 | 43 | 88-435 | 641 | | AR089: 27, AR061: 11 | | |
| | | | | | | | H0271: 3, H0250: 2, | | |
| | | | | | | | H0635: 2, S0216: 2, | | |
| | | | | | | | H0254: 1, H0638: 1, | | |
| | | | | | | | H0069: 1, H0416: 1, | | |
| | | | | | | | H0090: 1, L0761: 1, | | |
| | | | | | | | L0800: 1, L0776: 1, | | |
| | | | | | | | L0789: 1 and S0052: 1. | | |
| 34 | HHASQ32 | 1198902 | 44 | 50-892 | 642 | Gly-1 to Gly-6, | AR089: 21, AR061: 7 | | |
| | | | | | | Arg-12 to Arg-17, | H0510: 3, S0438: 2, | | |
| | | | | | | Gln-56 to Ser-71, | L0803: 2, L0615: 1, | | |
| | | | | | | Glu-82 to Glu-89, | S0418: 1, H0393: 1, | | |
| | | | | | | Phe-94 to Glu-104, | H0632: 1, H0355: 1, | | |
| | | | | | | Ala-126 to Asn-131, | L0774: 1, H0144: 1, | | |
| | | | | | | Pro-167 to Gly-177, | L0749: 1, L0750: 1, | | |
| | | | | | | Thr-224 to Ala-233, | L0605: 1 and L0581: 1. | | |
| | | | | | | Leu-237 to Lys-281. | | | |
| | | 928730 | 363 | 40-855 | 961 | Gly-1 to Gly-6, | | | |
| | | | | | | Arg-12 to Arg-17. | | | |
| 35 | HARAB87 | 1164340 | 45 | 3-548 | 643 | | AR051: 29, AR050: | | |
| | | | | | | | 24, AR054: 18, AR089: | | |
| | | | | | | | 1, AR061: 0 | | |
| | | | | | | | T0082: 1, T0023: 1 and | | |
| | | | | | | | L0596: 1. | | |
| | | 933441 | 364 | 181-768 | 962 | | | | |
| 36 | HTNGF69 | 1152268 | 46 | 501-803 | 644 | Ser-1 to Gly-23, | AR061: 3, AR089: 2 | | |
| | | | | | | Gly-85 to Leu-91. | L0758: 3, L0666: 2, | | |
| | | | | | | | L0751: 2, L0777: 2, | | |
| | | | | | | | H0663: 1, L0021: 1, | | |
| | | | | | | | H0309: 1, H0688: 1, | | |
| | | | | | | | H0617: 1, H0477: 1, | | |
| | | | | | | | L0766: 1, L0775: 1, | | |
| | | | | | | | L0367: 1, L0789: 1, | | |
| | | | | | | | L0663: 1, L0438: 1, | | |
| | | | | | | | L0749: 1, L0779: 1, | | |
| | | | | | | | L0757: 1 and S0456: 1. | | |
| | | 933614 | 365 | 483-785 | 963 | Ser-1 to Gly-23, | | | |
| | | | | | | Gly-85 to Leu-91. | | | |
| 37 | HMSJL96 | 1154788 | 47 | 1-1461 | 645 | Thr-15 to Arg-22, | AR054: 16, AR051: | | |
| | | | | | | Ala-38 to Met-43, | 15, AR050: 12, AR089: | | |
| | | | | | | Gln-49 to Lys-64, | 0, AR061: 0 | | |
| | | | | | | Thr-97 to Gln-108, | L0777: 6, L0758: 5, | | |
| | | | | | | Tyr-132 to Ser-139, | L0779: 4, L0803: 3, | | |
| | | | | | | His-219 to Gln-265, | S0358: 2, H0004: 2, | | |
| | | | | | | Ala-354 to Gly-362, | L0662: 2, L0775: 2, | | |
| | | | | | | Ser-379 to Ala-386, | H0144: 2, S0126: 2, | | |
| | | | | | | Asp-402 to Ser-417, | S0328: 2, S3014: 2, | | |
| | | | | | | Leu-424 to Glu-433, | S0027: 2, L0743: 2, | | |
| | | | | | | Arg-443 to Gly-459, | L0748: 2, H0265: 1, | | |
| | | | | | | Ser-463 to Ser-472. | H0656: 1, S0212: 1, | | |
| | | | | | | | H0663: 1, H0638: 1, | | |
| | | | | | | | H0580: 1, H0632: 1, | | |
| | | | | | | | H0486: 1, H0599: 1, | | |
| | | | | | | | H0618: 1, L0105: 1, | | |
| | | | | | | | H0251: 1, H0309: 1, | | |
| | | | | | | | H0544: 1, H0123: 1, | | |
| | | | | | | | H0050: 1, L0471: 1, | | |
| | | | | | | | H0024: 1, H0399: 1, | | |
| | | | | | | | S0003: 1, H0364: 1, | | |
| | | | | | | | H0553: 1, H0038: 1, | | |
| | | | | | | | H0412: 1, H0413: 1, | | |
| | | | | | | | T0041: 1, S0344: 1, | | |
| | | | | | | | S0002; 1, L0598: 1, | | |
| | | | | | | | H0529: 1, L0645: 1, | | |
| | | | | | | | L0363: 1, L0649: 1, | | |
| | | | | | | | L0804: 1, L0805: 1, | | |
| | | | | | | | L0558: 1, L0659: 1, | | |
| | | | | | | | L0528: 1, L0789: 1, | | |
| | | | | | | | L0792: 1, L0666: 1, | | |
| | | | | | | | S0374: 1, H0555: 1, | | |
| | | | | | | | S3012: 1, S0028: 1, | | |
| | | | | | | | S0206: 1, S0032: 1, | | |
| | | | | | | | L0439: 1, L0757: 1, | | |
| | | | | | | | S0031: 1, H0707: 1, | | |
| | | | | | | | S0192: 1, H0423: 1, | | |
| | | | | | | | S0042: 1 and H0008: 1. | | |
| | | 934483 | 366 | 1-426 | 964 | Thr-15 to Arg-22, | | | |
| | | | | | | Ala-38 to Met-43, | | | |
| | | | | | | Gln-49 to Lys-64, | | | |
| | | | | | | Thr-97 to Gln-108, | | | |
| | | | | | | Thr-131 to Lys-137. | | | |
| 38 | HDTBT06 | 1205261 | 48 | 3-905 | 646 | | AR089: 2, AR061: 1 | | |
| | | | | | | | L0754: 6, H0318: 3, | | |
| | | | | | | | H0486: 2, H0014: 2, | | |
| | | | | | | | L0777: 2, H0543: 2, | | |
| | | | | | | | H0171: 1, S6024: 1, | | |
| | | | | | | | H0650: 1, S0354: 1, | | |
| | | | | | | | H0455: 1, H0013: 1, | | |
| | | | | | | | L0483: 1, H0494: 1, | | |
| | | | | | | | S0450: 1, L0520: 1, | | |
| | | | | | | | L0763: 1, L0769: 1, | | |
| | | | | | | | L0641: 1, L0521: 1, | | |
| | | | | | | | L0662: 1, L0774: 1, | | |
| | | | | | | | L0776: 1, L0783: 1, | | |
| | | | | | | | L0663: 1, S0136: 1, | | |
| | | | | | | | H0478: 1, L0742: 1, | | |
| | | | | | | | L0439: 1, L0780: 1, | | |
| | | | | | | | L0592: 1, S0192: 1 and | | |
| | | | | | | | S0424: 1. | | |
| | | 935404 | 367 | 1-906 | 965 | | | | |
| 39 | HTTIE47 | 1165363 | 49 | 2-574 | 647 | Thr-8 to Ser-16, | AR061: 4, AR089: 4 | | |
| | | | | | | Arg-34 to Leu-42, | L0615: 1, S0420: 1, | | |
| | | | | | | Thr-46 to Glu-51, | H0333: 1, H0286: 1, | | |
| | | | | | | Thr-57 to Arg-66, | H0634: 1 and H0144: 1. | | |
| | | | | | | Gln-94 to Ala-100, | | | |
| | | | | | | Ser-127 to Glu-134. | | | |
| | | 941834 | 368 | 1-567 | 966 | Thr-6 to Ser-14, | | | |
| | | | | | | Arg-32 to Leu-40, | | | |
| | | | | | | Thr-44 to Glu-49, | | | |
| | | | | | | Thr-55 to Arg-64, | | | |
| | | | | | | Gln-92 to Ala-98, | | | |
| | | | | | | Ser-125 to Glu-132. | | | |
| 40 | HHFBP47 | 946668 | 50 | 825-253 | 648 | Cys-9 to Arg-14, | AR089: 5, AR061: 5 | | |
| | | | | | | Arg-21 to Gly-28. | L0748: 2, L0749: 2, | | |
| | | | | | | | H0085: 1, H0050: 1, | | |
| | | | | | | | H0090: 1 and L0758: 1. | | |
| 41 | HCCCC81 | 1083553 | 51 | 562-2 | 649 | | AR089: 12, AR061: 7 | | |
| | | | | | | | H0583: 1, H0675: 1 | | |
| | | | | | | | and H0457: 1. | | |
| | | 949062 | 369 | 139-921 | 967 | Gly-8 to Ile-13, | | | |
| | | | | | | Glu-141 to His-146, | | | |
| | | | | | | Glu-186 to Glu-195, | | | |
| | | | | | | Asp-213 to Asn-218. | | | |
| 42 | HPJEV71 | 1197841 | 52 | 976-164 | 650 | Gln-49 to Pro-66, | AR089: 7, AR061: 6 | | |
| | | | | | | Ser-96 to Thr-108, | H0521: 2, H0039: 1, | | |
| | | | | | | Glu-116 to Glu-135, | H0641: 1, H0529: 1, | | |
| | | | | | | Arg-140 to Pro-152, | L0654: 1, H0701: 1, | | |
| | | | | | | Ser-167 to Arg-172, | H0518: 1, S0152: 1 and | | |
| | | | | | | Pro-175 to Leu-185, | H0522: 1. | | |
| | | | | | | Ala-199 to Lys-215, | | | |
| | | | | | | Pro-228 to Leu-237, | | | |
| | | | | | | Pro-247 to Ser-253. | | | |
| | | 949153 | 370 | 269-2029 | 968 | Ser-5 to Gly-20. | | | |
| 43 | HTEIL07 | 1136121 | 53 | 43-1143 | 651 | Glu-13 to Asp-29, | AR061: 1, AR089: 0 | | |
| | | | | | | Glu-50 to Lys-58, | L0758: 4, L0617: 2, | | |
| | | | | | | Thr-61 to Glu-66, | L0794: 2, H0253: 1, | | |
| | | | | | | Ala-94 toTyr-100, | H0038: 1, H0616: 1, | | |
| | | | | | | Gln-146 to Ser-156, | L0789: 1 and L0779: 1. | | |
| | | | | | | Pro-171 to Asp-177, | | | |
| | | | | | | Ile-179 to Trp-191, | | | |
| | | | | | | Glu-197 to Val-203, | | | |
| | | | | | | Asp-238 to Lys-244, | | | |
| | | | | | | Pro-304 to Ala-315. | | | |
| | | 953803 | 371 | 42-443 | 969 | Glu-13 to Thr-27. | | | |
| 44 | HTEAG49 | 954614 | 54 | 510-208 | 652 | | AR089: 1, AR061: 0 | | |
| | | | | | | | L0759: 4, L0770: 2, | | |
| | | | | | | | S0040: 1, S0318: 1, | | |
| | | | | | | | S0334: 1, S0316: 1, | | |
| | | | | | | | S0340: 1, H0038: 1, | | |
| | | | | | | | L0598: 1, L0800: 1 and | | |
| | | | | | | | S0276: 1. | | |
| 45 | HSLCF96 | 637670 | 55 | 355-1248 | 653 | Val-2 to Trp-7, | AR054: 38, AR050: | | |
| | | | | | | Lys-9 to Trp-18, | 26, AR051: 25, AR061: | | |
| | | | | | | Gln-20 to Gly-25, | 2, AR089: 1 | | |
| | | | | | | Gln-79 to His-85, | S0028: 1 | | |
| | | | | | | Pro-134 to Asp-139, | | | |
| | | | | | | Asp-164 to Thr-171, | | | |
| | | | | | | Pro-223 to Arg-228. | | | |
| | | 954777 | 372 | 1332-430 | 970 | Thr-1 to Cys-6, | | | |
| | | | | | | Ser-52 to Gly-57, | | | |
| | | | | | | Gln-111 to His-117. | | | |
| 46 | HNHCI32 | 861673 | 56 | 183-593 | 654 | Lys-17 to Thr-23, | AR051: 23, AR050: | | |
| | | | | | | His-95 to Thr-101. | 14, AR061: 10, AR054: | | |
| | | | | | | | 4, AR089: 3 | | |
| | | | | | | | S0053: 1 | | |
| | | 956105 | 373 | 963-553 | 971 | Lys-17 to Thr-23, | | | |
| | | | | | | His-95 to Thr-101. | | | |
| 47 | HPMFL08 | 1050684 | 57 | 191-391 | 655 | | AR089: 1, AR061: 1 | | |
| | | | | | | | H0031: 2 | | |
| | | 959569 | 374 | 191-346 | 972 | Met-43 to Trp-52. | | | |
| 48 | HTXRA13 | 959622 | 58 | 3-1091 | 656 | Ser-1 to Ser-6, | AR061: 1, AR089: 0 | | |
| | | | | | | Thr-14 to Gly-28. | H0556: 2, L0756: 2, | | |
| | | | | | | | H0423: 2, S0134: 1, | | |
| | | | | | | | H0580: 1, H0271: 1, | | |
| | | | | | | | T0006: 1, H0264: 1, | | |
| | | | | | | | H0560: 1, H0641: 1, | | |
| | | | | | | | S0142: 1, L0805: 1, | | |
| | | | | | | | L0809: 1, L0789: 1, | | |
| | | | | | | | H0555: 1, L0780: 1 and | | |
| | | | | | | | S0031: 1. | | |
| 49 | HCE3H71 | 1197898 | 59 | 410-988 | 657 | His-14 to Gly-19, | AR089: 14, AR061: 10 | | |
| | | | | | | Pro-21 to Pro-28, | L0439: 12, L0438: 5, | | |
| | | | | | | Arg-49 to Gln-54, | L0741: 4, H0052: 2, | | |
| | | | | | | Pro-82 to Pro-91, | H0009: 2, L0769: 2, | | |
| | | | | | | Gly-102 to Ser-108, | L0794: 2, H0229: 1, | | |
| | | | | | | Arg-150 to Ser-155, | H0572: 1, L0770: 1, | | |
| | | | | | | Pro-160 to Asn-168, | L0796: 1, L0789: 1 and | | |
| | | | | | | Ala-175 to Glu-188. | L0786: 1. | | |
| | | 961681 | 375 | 275-826 | 973 | | | | |
| 50 | HUTSF11 | 1134914 | 60 | 3-323 | 658 | Pro-4 to Glu-13, | AR089: 0, AR061: 0 | | |
| | | | | | | Asn-23 to Arg-29, | S0464: 1 and L0356: 1. | | |
| | | | | | | Gln-91 to Arg-100. | | | |
| | | 966029 | 376 | 3-302 | 974 | Glu-1 to Glu-6, | | | |
| | | | | | | Asn-16 to Arg-22. | | | |
| 51 | HTEGI48 | 1021235 | 61 | 1-549 | 659 | Arg-1 to Ser-12, | AR089: 4, AR061: 1 | | |
| | | | | | | Leu-33 to Leu-40, | H0038: 2, H0556: 1, | | |
| | | | | | | His-42 to Phe-49, | H0341: 1 and L0596: 1. | | |
| | | | | | | Glu-51 to Met-57, | | | |
| | | | | | | Gly-72 to Phe-78. | | | |
| | | 530595 | 377 | 32-523 | 975 | Val-3 to Tyr-15, | | | |
| | | | | | | Leu-17 to Thr-27, | | | |
| | | | | | | Ser-34 to Ser-61, | | | |
| | | | | | | Leu-82 to Leu-89, | | | |
| | | | | | | His-91 to Phe-98, | | | |
| | | | | | | Glu-100 to Met-106, | | | |
| | | | | | | Gly-121 to Phe-127. | | | |
| 52 | HSFAM09 | 1153913 | 62 | 152-295 | 660 | Arg-1 to Ser-8, | AR061: 5, AR089: 2 | | |
| | | | | | | Lys-42 to Lys-48. | H0154: 2 | | |
| | | 573345 | 378 | 147-332 | 976 | Arg-1 to Ser-8, | | | |
| | | | | | | Lys-42 to Lys-48. | | | |
| 53 | HNFHK77 | 1182286 | 63 | 165-662 | 661 | Pro-38 to Lys-43, | AR061: 1, AR089: 0 | | |
| | | | | | | Glu-126 to Tyr-132, | H0271: 2 | | |
| | | | | | | Trp-161 to Arg-166. | | | |
| | | 576186 | 379 | 165-422 | 977 | Pro-38 to Lys-43. | | | |
| 54 | HFXDO83 | 1012602 | 64 | 12-608 | 662 | | AR089: 1, AR061: 1 | | |
| | | | | | | | S0001: 3 | | |
| | | 578847 | 380 | 16-207 | 978 | Arg-1 to Cys-10. | | | |
| 55 | HSDIW73 | 1104406 | 65 | 1-1068 | 663 | Leu-4 to Pro-9, | AR051: 4, AR054: 1, | | |
| | | | | | | Ile-64 to Arg-69, | AR089: 1, AR061: 0, | | |
| | | | | | | Asn-142 to Pro-147, | AR050: 0 | | |
| | | | | | | Pro-349 to Asp-356. | S0046: 1, S0028: 1, | | |
| | | | | | | | S0031: 1 and S0260: 1. | | |
| | | 587311 | 381 | 2-1075 | 979 | Leu-6 to Pro-11, | | | |
| | | | | | | Ile-66 to Arg-71, | | | |
| | | | | | | Asn-144 to Pro-149, | | | |
| | | | | | | Pro-351 to Asp-358. | | | |
| | | 954821 | 382 | 1595-549 | 980 | Ile-57 to Arg-62, | | | |
| | | | | | | Asn-135 to Pro-140, | | | |
| | | | | | | Pro-342 to Asp-349. | | | |
| 56 | HFVGD23 | 1199645 | 66 | 2-1003 | 664 | Ser-4 to Arg-9, | AR089: 5, AR061: 3 | | |
| | | | | | | Glu-41 to Ser-53, | S0250: 4, L0745: 2, | | |
| | | | | | | Arg-67 to Ser-72, | H0393: 1, H0587: 1, | | |
| | | | | | | Asn-111 to Arg-122, | L0744: 1, L0748: 1, | | |
| | | | | | | Gly-212 to Arg-218, | L0439: 1 and L0752: 1. | | |
| | | | | | | Gln-229 to Ser-235, | | | |
| | | | | | | Arg-239 to Lys-244. | | | |
| | | 676214 | 383 | 2-478 | 981 | Ser-4 to Arg-9, | | | |
| | | | | | | Glu-41 to Ser-53, | | | |
| | | | | | | Arg-67 to Ser-72, | | | |
| | | | | | | Asn-111 to Arg-122. | | | |
| 57 | HMSBZ24 | 1082367 | 67 | 2-718 | 665 | Lys-79 to ASp-87, | AR061: 4, AR089: 2 | | |
| | | | | | | Lys-100 to Asp-106. | H0331: 1, S0002: 1, | | |
| | | | | | | | H0519: 1 and L0741: 1. | | |
| | | 678707 | 384 | 2-322 | 982 | | | | |
| 58 | HWHHB69 | 1217042 | 68 | 3-2186 | 666 | Thr-1 to Ser-10, | AR089: 1, AR061: 1 | | |
| | | | | | | Ala-73 to Tyr-80, | L0803: 3, S0354: 2, | | |
| | | | | | | Arg-133 to Ser-143, | H0052: 2, H0617: 2, | | |
| | | | | | | Gly-174 to His-179, | L0770: 2, L0646: 2, | | |
| | | | | | | Ser-201 to Arg-224, | S0028: 2, L0753: 2, | | |
| | | | | | | Asn-236 to Gly-241, | H0445: 2, H0556: 1, | | |
| | | | | | | Tyr-260 to Cys-272, | S6024: 1, H0657: 1, | | |
| | | | | | | Pro-274 to Thr-284, | S0418: 1, S0420: 1, | | |
| | | | | | | Gln-292 to Glu-306, | H0351: 1, H0441: 1, | | |
| | | | | | | Cys-409 to Arg-414, | H0586: 1, H0013: 1, | | |
| | | | | | | Arg-424 to Arg-432, | S0280: 1, H0156: 1, | | |
| | | | | | | Asp-523 to His-531, | L0021: 1, H0122: 1, | | |
| | | | | | | Thr-552 to Pro-557, | S0010: 1, H0571: 1, | | |
| | | | | | | Asn-601 to Pro-606, | L0163: 1, H0135: 1, | | |
| | | | | | | His-612 to His-618, | H0412: 1, H0100: 1, | | |
| | | | | | | Pro-678 to His-684, | L0351: 1, L0769: 1, | | |
| | | | | | | Asn-698 to Gln-705. | L0639: 1, L0764: 1, | | |
| | | | | | | | L0649: 1, L0659: 1, | | |
| | | | | | | | L0809: 1, L0530: 1, | | |
| | | | | | | | H0520: 1, H0547: 1, | | |
| | | | | | | | H0519: 1, H0690: 1, | | |
| | | | | | | | H0539: 1, S0136: 1, | | |
| | | | | | | | H0696: 1, L0748: 1, | | |
| | | | | | | | L0747: 1, L0756: 1, | | |
| | | | | | | | L0779: 1, L0757: 1, | | |
| | | | | | | | S0434: 1, S0436: 1, | | |
| | | | | | | | S0011: 1 and H0136: 1. | | |
| | | 690442 | 385 | 1-261 | 983 | Gly-1 to Ser-7. | | | |
| 59 | HFXLC69 | 1162543 | 69 | 16-939 | 667 | Gly-49 to Gly-60, | AR061: 1, AR089: 1 | | |
| | | | | | | Arg-84 to Cys-97, | H0052: 2, H0135: 2, | | |
| | | | | | | Pro-100 to Gln-106, | S0282: 1, H0254: 1, | | |
| | | | | | | Ala-113 to Ala-137, | H0051: 1, H0634: 1, | | |
| | | | | | | Ala-145 to Trp-156, | S0152: 1, H0436: 1 and | | |
| | | | | | | Ala-172 to Tyr-182, | H0677: 1. | | |
| | | | | | | Asn-218 to Tyr-225. | | | |
| | | 692773 | 386 | 3-230 | 984 | | | | |
| 60 | HBXBW40 | 1156765 | 70 | 124-588 | 668 | Ser-1 to Ser-12, | AR089: 16, AR061: 8 | | |
| | | | | | | Arg-33 to Arg-50, | S0038: 2, H0438: 1, | | |
| | | | | | | Tyr-117 to Leu-125. | S0049: 1 and H0547: 1. | | |
| | | 706115 | 387 | 124-456 | 985 | Gln-3 to Ser-12, | | | |
| | | | | | | Arg-33 to Arg-50, | | | |
| | | | | | | Ser-93 to Glu-98. | | | |
| 61 | HCE1L51 | 1140498 | 71 | 3-434 | 669 | | AR089: 4, AR061: 3 | | |
| | | | | | | | S0206: 2, H0052: 1, | | |
| | | | | | | | T0010: 1 and H0604: 1. | | |
| | | 715899 | 388 | 3-434 | 986 | | | | |
| 62 | HRADM45 | 1148046 | 72 | 2-472 | 670 | Lys-1 to Leu-6, | AR089: 14, AR061: 6 | | |
| | | | | | | Asp-25 to Pro-30. | H0555: 1 and L0777: | | |
| | | | | | | | 1. | | |
| | | 717358 | 389 | 2-472 | 987 | Lys-1 to Leu-6, | | | |
| | | | | | | Asp-25 to Pro-30. | | | |
| 63 | HTEFO45 | 1153918 | 73 | 61-597 | 671 | Leu-59 to Thr-82, | AR061: 6, AR089: 3 | | |
| | | | | | | Lys-89 to Gly-94, | L0758: 2, S0222: 1, | | |
| | | | | | | Gln-155 to Val-161, | H0038: 1 and H0539: 1. | | |
| | | | | | | Lys-169 to Ala-179. | | | |
| | | 723446 | 390 | 3-482 | 988 | Gln-6 to Lys-14, | | | |
| | | | | | | Leu-68 to Glu-90. | | | |
| 64 | HOHBN82 | 1152271 | 74 | 2-1465 | 672 | Asn-41 to Pro-50, | AR089: 1, AR061: 0 | | |
| | | | | | | Asp-60 to Glu-71, | S0002: 2, H0521: 2, | | |
| | | | | | | Leu-121 to Pro-130, | S0360: 1, H0123: 1, | | |
| | | | | | | Glu-139 to Thr-144, | S0250: 1, L0654: 1, | | |
| | | | | | | Asp-155 to Ser-166, | S0152: 1, L0740: 1 and | | |
| | | | | | | Gly-174 to Leu-187, | L0749: 1. | | |
| | | | | | | Pro-194 to Pro-199, | | | |
| | | | | | | Arg-211 to Asp-228, | | | |
| | | | | | | Gly-256 to Phe-270, | | | |
| | | | | | | Asp-334 to Gly-344, | | | |
| | | | | | | Gly-356 to Val-373, | | | |
| | | | | | | Glu-398 to Met-403, | | | |
| | | | | | | Asn-418 to Leu-424, | | | |
| | | | | | | Glu-444 to Trp-451, | | | |
| | | | | | | Cys-465 to Tyr-474. | | | |
| | | 724322 | 391 | 3-629 | 989 | Asn-41 to Pro-50, | | | |
| | | | | | | Asp-60 to Glu-71, | | | |
| | | | | | | Leu-121 to Pro-130, | | | |
| | | | | | | Glu-139 to Thr-144, | | | |
| | | | | | | Asp-155 to Ser-166, | | | |
| | | | | | | Gly-174 to Asp-188. | | | |
| 65 | HWHGF52 | 1217026 | 75 | 834-1 | 673 | Lys-1 to Ala-6, | AR089: 1, AR061: 0 | | |
| | | | | | | Ser-38 to Gln-43, | L0776: 5, L0764: 4, | | |
| | | | | | | Pro-88 to Ala-112, | L0743: 4, L0740: 3, | | |
| | | | | | | Pro-141 to Asp-148, | L0750: 3, L0777: 3, | | |
| | | | | | | Gly-186 to Thr-200, | L0731: 3, S0001: 2, | | |
| | | | | | | Pro-231 to Ala-238, | H0438: 2, H0052: 2, | | |
| | | | | | | Leu-248 to Ser-254. | H0194: 2, H0201: 2, | | |
| | | | | | | | L0526: 2, H0144: 2, | | |
| | | | | | | | L0742: 2, H0662: 1, | | |
| | | | | | | | H0619: 1, H0261: 1, | | |
| | | | | | | | H0392: 1, H0455: 1, | | |
| | | | | | | | H0586: 1, H0587: 1, | | |
| | | | | | | | H0574: 1, H0486: 1, | | |
| | | | | | | | H0013: 1, H0427: 1, | | |
| | | | | | | | S0010: 1, S0346: 1, | | |
| | | | | | | | T0110: 1, H0009: 1, | | |
| | | | | | | | L0157: 1, H0320: 1, | | |
| | | | | | | | H0051: 1, T0006: 1, | | |
| | | | | | | | H0604: 1, H0163: 1, | | |
| | | | | | | | H0646: 1, L0763: 1, | | |
| | | | | | | | L0638: 1, L0630: 1, | | |
| | | | | | | | L0646: 1, L0773: 1, | | |
| | | | | | | | L0651: 1, L0523: 1, | | |
| | | | | | | | L0805: 1, L0666: 1, | | |
| | | | | | | | L0663: 1, L0664: 1, | | |
| | | | | | | | H0547: 1, H0660: 1, | | |
| | | | | | | | S0404: 1, L0744: 1, | | |
| | | | | | | | L0439: 1, L0752: 1, | | |
| | | | | | | | S0434: 1 and L0595: 1. | | |
| | | 726102 | 392 | 1-453 | 990 | Gln-1 to Lys-8, | | | |
| | | | | | | Gly-10 to Trp-17, | | | |
| | | | | | | Val-28 to Gly-43, | | | |
| | | | | | | Thr-54 to Glu-63. | | | |
| 66 | HBKDI30 | 1223861 | 76 | 1115-321 | 674 | | AR089: 1, AR061: 0 | | |
| | | | | | | | S0364: 3, S0366: 3, | | |
| | | | | | | | L0604: 3, H0624: 1, | | |
| | | | | | | | L0622: 1, L0623: 1, | | |
| | | | | | | | H0041: 1, L0791: 1, | | |
| | | | | | | | S0380: 1 and L0748: 1. | | |
| | | 729048 | 393 | 1-381 | 991 | Gly-15 to Thr-21, | | | |
| | | | | | | Glu-76 to Lys-86. | | | |
| 67 | HSQFR54 | 1185143 | 77 | 1-1170 | 675 | Ser-116 to Asp-125, | AR061: 4, AR089: 2 | | |
| | | | | | | Glu-183 to Ser-188, | H0650: 2, H0052: 2, | | |
| | | | | | | Arg-228 to Gln-234, | H0547: 2, H0542: 2, | | |
| | | | | | | Leu-280 to Lys-303. | S0212: 1, S0222: 1, | | |
| | | | | | | | T0114: 1, L0483: 1, | | |
| | | | | | | | H0628: 1, L0455: 1, | | |
| | | | | | | | H0413: 1, S0344: 1, | | |
| | | | | | | | L0766: 1, L0775: 1, | | |
| | | | | | | | L0805: 1, L0665: 1, | | |
| | | | | | | | H0520: 1, H0519: 1, | | |
| | | | | | | | S0126: 1, H0521: 1, | | |
| | | | | | | | S0044: 1, S0390: 1, | | |
| | | | | | | | L0592: 1 and S0026: 1. | | |
| | | 730964 | 394 | 2-319 | 992 | Glu-41 to Ser-46. | | | |
| 68 | HAGBA56 | 1102593 | 78 | 1-735 | 676 | Pro-2 to Gly-10. | AR061: 2, AR089: 1 | | |
| | | | | | | | S0010: 1, H0135: 1, | | |
| | | | | | | | L0766: 1, L0745: 1, | | |
| | | | | | | | L0779: 1 and L0758: 1. | | |
| | | 732597 | 395 | 115-633 | 993 | Asp-52 to Leu-57, | | | |
| | | | | | | Lys-82 to Thr-87, | | | |
| | | | | | | Ser-90 to Trp-98, | | | |
| | | | | | | Ser-118 to Leu-123. | | | |
| 69 | HHSAE29 | 1220851 | 79 | 563-985 | 677 | His-13 to Asn-24. | AR061: 2, AR089: 1 | | |
| | | | | | | | S0282: 1 and S0051: 1. | | |
| | | 743166 | 396 | 2-325 | 994 | | | | |
| 70 | HMSHO64 | 746582 | 80 | 1-411 | 678 | Ser-11 to Ser-21, | AR089: 2, AR061: 2 | | |
| | | | | | | Ser-84 to Ala-89, | S0002: 2 | | |
| | | | | | | Pro-98 to Arg-107. | | | |
| 71 | HFPBW22 | 1154786 | 81 | 762-376 | 679 | Lys-1 to Ala-6, | AR061: 4, AR089: 2 | | |
| | | | | | | Ala-17 to Leu-25, | S0222: 1, S0280: 1, | | |
| | | | | | | Arg-54 to Ala-59, | L0774: 1, L0376: 1 and | | |
| | | | | | | Val-61 to Arg-66, | S0378: 1. | | |
| | | | | | | Ser-90 to Gly-95. | | | |
| | | 750631 | 397 | 224-619 | 995 | | | | |
| 72 | HTLBH67 | 1224371 | 82 | 2886-2005 | 680 | Lys-31 to Ala-48, | AR061: 2, AR089: 1 | | |
| | | | | | | Gln-51 to Thr-62, | L0752: 3, L0747: 2, | | |
| | | | | | | Gln-105 to Ser-110, | H0294: 1, H0253: 1, | | |
| | | | | | | Cys-126 to Leu-134, | H0046: 1, H0040: 1, | | |
| | | | | | | Gln-137 to Gly-150, | H0063: 1, H0494: 1, | | |
| | | | | | | His-174 to Ala-205, | S0352: 1, L0769: 1, | | |
| | | | | | | Arg-212 to Pro-220, | L0766: 1, L0804: 1, | | |
| | | | | | | Pro-227 to Gly-232, | L0805: 1, L0791: 1, | | |
| | | | | | | Gly-245 to Ala-251, | H0521: 1, L0779: 1, | | |
| | | | | | | Ala-257 to Ser-263, | L0780: 1, L0731: 1 and | | |
| | | | | | | Leu-266 to His-283. | L0758: 1. | | |
| | | 751985 | 398 | 1-282 | 996 | | | | |
| 73 | HNTMH70 | 1143523 | 83 | 2-679 | 681 | Pro-1 to Glu-6, | AR089: 0, AR061: 0 | | |
| | | | | | | His-17 to Lys-22, | H0520: 1 | | |
| | | | | | | Pro-52 to Gln-58, | | | |
| | | | | | | Gly-123 to Arg-130, | | | |
| | | | | | | His-205 to Ala-210. | | | |
| | | 757184 | 399 | 2-688 | 997 | Pro-1 to Glu-6, | | | |
| | | | | | | His-17 to Lys-22, | | | |
| | | | | | | Pro-52 to Gln-58. | | | |
| 74 | HCETC59 | 1183334 | 84 | 105-326 | 682 | | AR089: 1, AR061: 1 | | |
| | | | | | | | H0052: 1 and H0194: | | |
| | | | | | | | 1. | | |
| | | 761881 | 400 | 105-326 | 998 | | | | |
| 75 | HE8UX76 | 1161223 | 85 | 2-1237 | 683 | Asp-8 to Ala-13, | AR061: 1, AR089: 1 | | |
| | | | | | | Ala-26 to Arg-33, | H0539: 4, L0439: 4, | | |
| | | | | | | Pro-38 to Ala-50, | L0438: 2, H0013: 1, | | |
| | | | | | | Pro-60 to Asn-65, | L0758: 1 and L0592: 1. | | |
| | | | | | | Asp-68 to Ser-74, | | | |
| | | | | | | Arg-109 to Arg-132, | | | |
| | | | | | | Asp-140 to Leu-145, | | | |
| | | | | | | Ala-149 to Ser-154, | | | |
| | | | | | | Ile-158 to Asp-169, | | | |
| | | | | | | Glu-171 to Ala-177, | | | |
| | | | | | | Cys-213 to Pro-218, | | | |
| | | | | | | Pro-226 to Lys-231, | | | |
| | | | | | | Thr-244 to Phe-249, | | | |
| | | | | | | Arg-361 to Ile-370. | | | |
| | | 767871 | 401 | 214-798 | 999 | Arg-39 to Arg-62, | | | |
| | | | | | | Asp-70 to Leu-75, | | | |
| | | | | | | Ala-79 to Ser-84, | | | |
| | | | | | | Ile-88 to Asp-99, | | | |
| | | | | | | Glu-101 to Ala-107. | | | |
| 76 | HTLEN77 | 1136124 | 86 | 3-947 | 684 | His-1 to Thr-6, | AR089: 33, AR061: 18 | | |
| | | | | | | Arg-30 to Thr-35, | L0748: 2 and H0253: | | |
| | | | | | | Lys-40 to Ala-71, | 1. | | |
| | | | | | | Pro-209 to Glu-222, | | | |
| | | | | | | Arg-231 to Tyr-237, | | | |
| | | | | | | Pro-239 to Tyr-245, | | | |
| | | | | | | Arg-263 to Ala-271, | | | |
| | | | | | | Gln-290 to Trp-306. | | | |
| | | 772363 | 402 | 90-422 | 1000 | Ala-1 to Ala-35. | | | |
| 77 | HBGDI80 | 1124695 | 87 | 2-523 | 685 | Asp-44 to Ile-50, | AR061: 13, AR089: 5 | | |
| | | | | | | Arg-121 to Leu-132, | L0805: 2, H0436: 2, | | |
| | | | | | | Lys-148 to Ser-160. | L0439: 2, L0362: 2, | | |
| | | | | | | | S0358: 1, L0483: 1, | | |
| | | | | | | | H0181: 1, S0422: 1, | | |
| | | | | | | | L0369: 1, L0804: 1, | | |
| | | | | | | | L0787: 1 and L0663: 1. | | |
| | | 781600 | 403 | 1-429 | 1001 | Asp-13 to Ile-19, | | | |
| | | | | | | Pro-37 to Arg-42. | | | |
| 78 | HELHB88 | 1225632 | 88 | 138-3230 | 686 | Gln-1 to Thr-7, | AR061: 2, AR089: 2 | | |
| | | | | | | Glu-28 to Gln-35, | L0777: 3, L0794: 2, | | |
| | | | | | | Lys-188 to Lys-207, | S0027: 2, L0748: 2, | | |
| | | | | | | Ser-238 to Gly-245, | L0747: 2, L0601: 2, | | |
| | | | | | | Asp-278 to Gly-283, | S0342: 1, S0212: 1, | | |
| | | | | | | Pro-317 to Ser-324, | S0282: 1, L0004: 1, | | |
| | | | | | | Ser-335 to Glu-342, | S0045: 1, H0581: 1, | | |
| | | | | | | Pro-344 to Lys-355, | T0110: 1, L0471: 1, | | |
| | | | | | | Glu-362 to Asn-373, | S6028: 1, H0551: 1, | | |
| | | | | | | Glu-385 to Arg-393, | H0494: 1, H0509: 1, | | |
| | | | | | | Arg-399 to Gln-417, | L0646: 1, L0665: 1, | | |
| | | | | | | Lys-422 to Gln-457, | H0520: 1, H0547: 1, | | |
| | | | | | | Glu-461 to Glu-477, | S0390: 1, L0591: 1, | | |
| | | | | | | Leu-514 to Glu-529, | L0366: 1 and H0653: 1. | | |
| | | | | | | Leu-538 to Met-548, | | | |
| | | | | | | Gln-562 to Gln-567, | | | |
| | | | | | | Asn-569 to Asp-574, | | | |
| | | | | | | Arg-594 to Gln-609, | | | |
| | | | | | | Asn-626 to Met-636, | | | |
| | | | | | | Ala-638 to Lys-649, | | | |
| | | | | | | Glu-654 to Gln-670, | | | |
| | | | | | | Gln-676 to Leu-716, | | | |
| | | | | | | Ser-736 to Gly-741, | | | |
| | | | | | | Phe-762 to Asp-768, | | | |
| | | | | | | Glu-808 to Val-815, | | | |
| | | | | | | Ser-847 to Trp-856, | | | |
| | | | | | | Asp-858 to Trp-876, | | | |
| | | | | | | Gln-892 to Ala-898, | | | |
| | | | | | | Pro-964 to Ile-976. | | | |
| | | 811935 | 404 | 136-567 | 1002 | Arg-1 to His-10. | | | |
| 79 | HTEMV66 | 1152261 | 89 | 1-669 | 687 | Ile-33 to Ser-40, | AR061: 5, AR089: 1 | | |
| | | | | | | Val-63 to Gln-69, | H0616: 1 and L0758: | | |
| | | | | | | Phe-84 to Ser-94, | 1. | | |
| | | | | | | Lys-205 to Lys-212. | | | |
| | | 813038 | 405 | 1-318 | 1003 | Ser-38 to Pro-45. | | | |
| 80 | HMTAJ73 | 1063989 | 90 | 704-3 | 688 | Gly-5 to Gln-15, | AR061: 24, AR089: 14 | | |
| | | | | | | Gly-104 to Gly-111, | L0806: 3, L0772: 2, | | |
| | | | | | | Gly-136 to Asp-141, | L0648: 2, H0255: 1, | | |
| | | | | | | His-228 to Pro-234. | L0717: 1, H0586: 1, | | |
| | | | | | | | H0599: 1, H0618: 1, | | |
| | | | | | | | H0581: 1, H0052: 1, | | |
| | | | | | | | H0123: 1, L0629: 1, | | |
| | | | | | | | L0659: 1, L0663: 1, | | |
| | | | | | | | S0330: 1, H0518: 1 and | | |
| | | | | | | | H0555: 1. | | |
| | | 813296 | 406 | 1-438 | 1004 | Pro-23 to Lys-28, | | | |
| | | | | | | Gln-39 to Thr-51, | | | |
| | | | | | | Lys-93 to Ala-106, | | | |
| | | | | | | Gln-112 to Pro-129, | | | |
| | | | | | | Pro-132 to Pro-143. | | | |
| 81 | HE9TD31 | 815845 | 91 | 3-674 | 689 | Ser-119 to Thr-127, | AR089: 0, AR061: 0 | | |
| | | | | | | Gln-134 to Ser-152. | S0354: 1, L0657: 1, | | |
| | | | | | | | H0144: 1 and S0330: 1. | | |
| 82 | HGBDG55 | 1141363 | 92 | 26-535 | 690 | Gly-1 to Ala-8, | AR089: 1, AR061: 1 | | |
| | | | | | | Phe-31 to Leu-36, | S0040: 1, H0014: 1, | | |
| | | | | | | Glu-54 to Lys-62, | H0030: 1, H0063: 1, | | |
| | | | | | | Gly-69 to Gly-75, | L0803: 1, H0521: 1 and | | |
| | | | | | | Leu-100 to Gly-106, | S0028: 1. | | |
| | | | | | | Ser-125 to Lys-131. | | | |
| | | 815858 | 407 | 26-400 | 1005 | Gly-1 to Ala-8, | | | |
| | | | | | | Phe-31 to Leu-36, | | | |
| | | | | | | Glu-54 to Lys-62, | | | |
| | | | | | | Gly-69 to Gly-75, | | | |
| | | | | | | Leu-100 to Gly-106. | | | |
| 83 | HOUHL51 | 1125914 | 93 | 2-508 | 691 | Ala-12 to Trp-19, | AR061: 6, AR089: 2 | | |
| | | | | | | Ala-21 to Arg-27, | L0758: 6, L0794: 3, | | |
| | | | | | | Glu-38 to Phe-49, | H0038: 2, L0768: 2, | | |
| | | | | | | Arg-90 to Val-102, | L0790: 2, L0731: 2, | | |
| | | | | | | Glu-144 to Gly-151, | S0342: 1, H0664: 1, | | |
| | | | | | | Tyr-164 to Ala-169. | H0616: 1, S0210: 1, | | |
| | | | | | | | L0773: 1 and L0608: 1. | | |
| | | 815891 | 408 | 3-527 | 1006 | | | | |
| 84 | HEOPP67 | 1020119 | 94 | 1-972 | 692 | Asp-27 to Val-32, | AR061: 1, AR089: 0 | | |
| | | | | | | Asp-66 to Gly-71. | H0457: 2, H0650: 1 | | |
| | | | | | | | and H0622: 1. | | |
| | | 827630 | 409 | 2-448 | 1007 | Arg-8 to Arg-17, | | | |
| | | | | | | Asp-47 to Val-52, | | | |
| | | | | | | Asp-86 to Gly-91. | | | |
| 85 | HKAOV71 | 1165423 | 95 | 1-732 | 693 | | AR089: 6, AR061: 2 | | |
| | | | | | | | H0013: 2, H0046: 2, | | |
| | | | | | | | H0036: 1, H0590: 1, | | |
| | | | | | | | H0581: 1, H0551: 1 and | | |
| | | | | | | | H0494: 1. | | |
| | | 827679 | 410 | 1-732 | 1008 | | | | |
| 86 | HDQID90 | 1137752 | 96 | 2-361 | 694 | Leu-12 to Gln-21. | AR089: 7, AR061: 3 | | |
| | | | | | | | L0766: 14, H0521: 4, | | |
| | | | | | | | L0748: 4, L0804: 3, | | |
| | | | | | | | L0776: 3, L0749: 3, | | |
| | | | | | | | L0731: 3, L0485: 3, | | |
| | | | | | | | S0376: 2, H0580: 2, | | |
| | | | | | | | L0483: 2, H0316: 2, | | |
| | | | | | | | S0002: 2, L0803: 2, | | |
| | | | | | | | L0775: 2, L0805: 2, | | |
| | | | | | | | L0659: 2, L0438: 2, | | |
| | | | | | | | H0265: 1, H0686: 1, | | |
| | | | | | | | H0656: 1, H0341: 1, | | |
| | | | | | | | S0212: 1, H0638: 1, | | |
| | | | | | | | H0125: 1, S0360: 1, | | |
| | | | | | | | H0411: 1, S0222: 1, | | |
| | | | | | | | H0409: 1, H0587: 1, | | |
| | | | | | | | H0014: 1, S0003: 1, | | |
| | | | | | | | H0163: 1, H0591: 1, | | |
| | | | | | | | H0488: 1, H0494: 1, | | |
| | | | | | | | H0641: 1, L0598: 1, | | |
| | | | | | | | H0529: 1, L0772: 1, | | |
| | | | | | | | L0764: 1, L0768: 1, | | |
| | | | | | | | L0774: 1, L0655: 1, | | |
| | | | | | | | L0783: 1, L0809: 1, | | |
| | | | | | | | L0792: 1, L0663: 1, | | |
| | | | | | | | L0665: 1, H0702: 1, | | |
| | | | | | | | H0519: 1, S0126: 1, | | |
| | | | | | | | H0682: 1, H0435: 1, | | |
| | | | | | | | H0672: 1, H0704: 1, | | |
| | | | | | | | S3012: 1, L0751: 1, | | |
| | | | | | | | L0750: 1, L0777: 1, | | |
| | | | | | | | L0752: 1, L0757: 1, | | |
| | | | | | | | L0758: 1, L0759: 1, | | |
| | | | | | | | L0362: 1, H0423: 1 and | | |
| | | | | | | | H0506: 1. | | |
| | | 831976 | 411 | 221-724 | 1009 | | | | |
| 87 | HFRBN81 | 1182552 | 97 | 2331-598 | 695 | | AR050: 10, AR051: 3, | | |
| | | | | | | | AR061: 1, AR089: 1, | | |
| | | | | | | | AR054: 0 | | |
| | | | | | | | S0028: 4, S0001: 2, | | |
| | | | | | | | S0278: 2, S0050: 2, | | |
| | | | | | | | S0282: 1, H0632: 1, | | |
| | | | | | | | H0271: 1, H0416: 1, | | |
| | | | | | | | H0027: 1, S0038: 1, | | |
| | | | | | | | S0052: 1, S0053: 1, | | |
| | | | | | | | H0684: 1 and S0044: 1. | | |
| | | 833061 | 412 | 1-1116 | 1010 | Gly-113 to Gly-119, | | | |
| | | | | | | Gln-173 to Thr-181, | | | |
| | | | | | | Ala-362 to Pro-368. | | | |
| | | 973206 | 413 | 1-435 | 1011 | | | | |
| | | 973208 | 414 | 138-587 | 1012 | Leu-51 to Ser-62. | | | |
| 88 | HFKJW01 | 1187134 | 98 | 487-8 | 696 | | AR089: 1, AR061: 0 | | |
| | | | | | | | H0620: 2, H0012: 1, | | |
| | | | | | | | S0152: 1 and S0260: 1. | | |
| | | 836491 | 415 | 3-440 | 1013 | | | | |
| 89 | HSDFL63 | 1219300 | 99 | 2590-1844 | 697 | Ser-83 to Lys-88, | AR061: 402, AR089: | | |
| | | | | | | Pro-95 to Asn-112, | 142 | | |
| | | | | | | Arg-180 to Asp-185, | H0038: 7, L0758: 5, | | |
| | | | | | | Met-231 to Arg-240. | H0616: 4, L0731: 4, | | |
| | | | | | | | S0002: 3, L0637: 3, | | |
| | | | | | | | H0623: 2, L0794: 2, | | |
| | | | | | | | L0809: 2, L0663: 2, | | |
| | | | | | | | H0522: 2, L0779: 2, | | |
| | | | | | | | L0777: 2, S0046: 1, | | |
| | | | | | | | H0431: 1, T0060: 1, | | |
| | | | | | | | H0013: 1, S0010: 1, | | |
| | | | | | | | H0545: 1, H0050: 1, | | |
| | | | | | | | S0023: 1, S0003: 1, | | |
| | | | | | | | H0328: 1, H0135: 1, | | |
| | | | | | | | H0163: 1, H0412: 1, | | |
| | | | | | | | H0102: 1, H0100: 1, | | |
| | | | | | | | T0042: 1, L0768: 1, | | |
| | | | | | | | L0803: 1, L0375: 1, | | |
| | | | | | | | L0542: 1, L0647: 1, | | |
| | | | | | | | L0367: 1, L0791: 1, | | |
| | | | | | | | L0664: 1, H0693: 1, | | |
| | | | | | | | S0328: 1, S0168: 1, | | |
| | | | | | | | S0031: 1 and H0008: 1. | | |
| | | 836498 | 416 | 1-249 | 1014 | Glu-1 to Asp-7, | | | |
| | | | | | | Met-53 to Met-60, | | | |
| | | | | | | Ile-78 to Ser-83. | | | |
| 90 | HPJET90 | 836503 | 100 | 39-377 | 698 | His-8 to Gly-18, | AR061: 0, AR089: 0 | | |
| | | | | | | Leu-40 to Ile-45, | S0152: 2 | | |
| | | | | | | Asn-100 to Asp-105. | | | |
| 91 | HEMFC61 | 836514 | 101 | 1-714 | 699 | Glu-4 to Ser-9, | AR061: 4, AR089: 3 | | |
| | | | | | | Ser-58 to Arg-65. | H0038: 7, L0758: 5, | | |
| | | | | | | | H0616: 4, L0731: 4, | | |
| | | | | | | | S0002: 3, L0637: 3, | | |
| | | | | | | | H0623: 2, L0794: 2, | | |
| | | | | | | | L0809: 2, L0663: 2, | | |
| | | | | | | | H0522: 2, L0779: 2, | | |
| | | | | | | | L0777: 2, S0046: 1, | | |
| | | | | | | | H0431: 1, T0060: 1, | | |
| | | | | | | | H0013: 1, S0010: 1, | | |
| | | | | | | | H0545: 1, H0050: 1, | | |
| | | | | | | | S0023: 1, S0003: 1, | | |
| | | | | | | | H0328: 1, H0135: 1, | | |
| | | | | | | | H0163: 1, H0412: 1, | | |
| | | | | | | | H0102: 1, H0100: 1, | | |
| | | | | | | | T0042: 1, L0768: 1, | | |
| | | | | | | | L0803: 1, L0375: 1, | | |
| | | | | | | | L0542: 1, L0647: 1, | | |
| | | | | | | | L0367: 1, L0791: 1, | | |
| | | | | | | | L0664: 1, H0693: 1, | | |
| | | | | | | | S0328: 1, S0168: 1, | | |
| | | | | | | | S0031: 1 and H0008: 1. | | |
| 92 | HDTBR50 | 1174351 | 102 | 467-234 | 700 | Thr-26 to Arg-31, | AR089: 41, AR061: 4 | | |
| | | | | | | Gly-73 to Trp-78. | H0486: 2 | | |
| | | 846630 | 417 | 130-342 | 1015 | Ala-2 to Glu-7, | | | |
| | | | | | | Arg-50 to Glu-58. | | | |
| 93 | HACCH94 | 847143 | 103 | 1-897 | 701 | Gly-1 to Ser-6, | AR061: 4, AR089: 2 | | |
| | | | | | | Arg-76 to Gln-88, | L0754: 6, L0766: 3, | | |
| | | | | | | Lys-113 to Ser-119, | L0731: 2, H0624: 1, | | |
| | | | | | | Tyr-125 to Lys-132, | H0170: 1, S0116: 1, | | |
| | | | | | | Ser-167 to Tyr-179, | S0280: 1, H0545: 1, | | |
| | | | | | | Arg-263 to Tyr-281, | T0006: 1, S0344: 1, | | |
| | | | | | | Ser-294 to Thr-299. | S0426: 1, L0770: 1, | | |
| | | | | | | | L0790: 1, L0748: 1, | | |
| | | | | | | | L0756: 1, L0779: 1, | | |
| | | | | | | | L0589: 1 and L0462: 1. | | |
| 94 | HE8T139 | 1223481 | 104 | 441-1166 | 702 | Thr-21 to Trp-26, | AR061: 2, AR089: 2 | | |
| | | | | | | Thr-72 to Val-88, | L0438: 4, L0746: 4, | | |
| | | | | | | Arg-115 to Tyr-127. | H0581: 2, H0656: 1, | | |
| | | | | | | | H0013: 1, L0471: 1, | | |
| | | | | | | | H0266: 1, H0328: 1, | | |
| | | | | | | | H0553: 1, S0438: 1, | | |
| | | | | | | | H0529: 1, L0766: 1, | | |
| | | | | | | | L0805: 1, H0520: 1, | | |
| | | | | | | | H0521: 1, L0752: 1 and | | |
| | | | | | | | S0192: 1. | | |
| | | 849161 | 418 | 3-470 | 1016 | Ser-8 to Thr-15, | | | |
| | | | | | | Arg-73 to Thr-79, | | | |
| | | | | | | Phe-86 to Leu-92. | | | |
| 95 | HEGAP32 | 1140393 | 105 | 525-1 | 703 | | AR061: 6, AR089: 3 | | |
| | | | | | | | H0550: 1, H0494: 1 | | |
| | | | | | | | and L0659: 1. | | |
| | | 851207 | 419 | 2-397 | 1017 | Arg-1 to Thr-14. | | | |
| 96 | HCWFU66 | 853005 | 106 | 3-311 | 704 | | AR061: 1, AR089: 1 | | |
| | | | | | | | H0305: 1 and H0589: | | |
| | | | | | | | 1. | | |
| 97 | HUSY129 | 853149 | 107 | 3-470 | 705 | Gln-57 to Ile-67, | AR061: 5, AR089: 2 | | |
| | | | | | | Asp-77 to Asp-85. | H0650: 2, H0052: 2, | | |
| | | | | | | | H0547: 2, H0542: 2, | | |
| | | | | | | | S0212: 1, S0222: 1, | | |
| | | | | | | | T0114: 1, L0483: 1, | | |
| | | | | | | | H0628: 1, L0455: 1, | | |
| | | | | | | | H0413: 1, S0344: 1, | | |
| | | | | | | | L0766: 1, L0775: 1, | | |
| | | | | | | | L0805: 1, L0665: 1, | | |
| | | | | | | | H0520: 1, H0519: 1, | | |
| | | | | | | | S0126: 1, H0521: 1, | | |
| | | | | | | | S0044: 1, S0390: 1, | | |
| | | | | | | | L0592: 1 and S0026: 1. | | |
| 98 | HMEFT66 | 1134131 | 108 | 82-933 | 706 | Gly-61 to Glu-67, | AR061: 1, AR089: 1 | | |
| | | | | | | Ala-88 to Gly-96, | H0175: 1, H0266: 1, | | |
| | | | | | | Gly-127 to Trp-137. | H0292: 1, H0628: 1 and | | |
| | | | | | | | L0779: 1. | | |
| | | 856149 | 420 | 2-349 | 1018 | | | | |
| 99 | HKAAR71 | 863023 | 109 | 54-977 | 707 | Gln-1 to Gln-6, | AR061: 1, AR089: 0 | | |
| | | | | | | Ser-24 to Thr-31, | H0494: 2, H0693: 2, | | |
| | | | | | | Pro-57 to Gln-63, | H0521: 2, H0580: 1, | | |
| | | | | | | Ala-96 to Met-104, | H0253: 1, H0628: 1, | | |
| | | | | | | Asn-124 to Lys-133, | H0522: 1 and H0422: 1. | | |
| | | | | | | Ser-172 to Trp-182, | | | |
| | | | | | | Ser-186 to Glu-194, | | | |
| | | | | | | Pro-286 to Pro-294. | | | |
| 100 | H7TBC95 | 865922 | 110 | 3-704 | 708 | Gln-154 to Ser-163. | AR089: 1, AR061: 1 | | |
| | | | | | | | S0198: 57, S0274: 12, | | |
| | | | | | | | S0252: 4, S0270: 3, | | |
| | | | | | | | S0264: 1, S0268: 1 and | | |
| | | | | | | | S0228: 1. | | |
| | | 908115 | 421 | 3-704 | 1019 | Gln-154 to Ser-163. | | | |
| 101 | HAPPX52 | 637493 | 111 | 827-1222 | 709 | Ser-59 to Ile-66, | AR050: 16, AR054: | | |
| | | | | | | Arg-73 to Gly-85. | 10, AR051: 5, AR061: | | |
| | | | | | | | 2, AR089: 1 | | |
| | | | | | | | H0305: 4, S0282: 1, | | |
| | | | | | | | H0575: 1, H0150: 1 and | | |
| | | | | | | | H0617: 1. | | |
| | | 872075 | 422 | 3-359 | 1020 | | | | |
| | | 872076 | 423 | 400-2 | 1021 | His-73 to Phe-81, | | | |
| | | | | | | Thr-92 to Trp-102. | | | |
| 102 | HBGSJ13 | 1152326 | 112 | 1-756 | 710 | Lys-1 to Lys-6, | AR089: 1, AR061: 0 | | |
| | | | | | | Gln-25 to Asp-36, | H0617: 2, H0013: 1, | | |
| | | | | | | Ser-85 to Ile-96, | H0271: 1, L0455: 1 and | | |
| | | | | | | Val-115 to Ser-136, | H0539: 1. | | |
| | | | | | | Lys-172 to Trp-177, | | | |
| | | | | | | Pro-188 to Phe-201, | | | |
| | | | | | | Gly-217 to Ala-224, | | | |
| | | | | | | Asn-230 to Gly-239. | | | |
| | | 878322 | 424 | 1-684 | 1022 | | | | |
| 103 | HFKLX38 | 880220 | 113 | 3-308 | 711 | | AR089: 1, AR061: 1 | | |
| | | | | | | | H0620: 2 | | |
| 104 | HTLGP15 | 1165362 | 114 | 196-786 | 712 | Gly-2 to Thr-10, | AR089: 4, AR061: 3 | | |
| | | | | | | Glu-160 to Gly-175, | T0010: 3, S0049: 2, | | |
| | | | | | | Thr-189 to Glu-197. | H0052: 2, L0415: 1, | | |
| | | | | | | | H0618: 1 and S0010: 1. | | |
| | | 880297 | 425 | 189-662 | 1023 | Gly-2 to Thr-10, | | | |
| | | | | | | Glu-99 to Gly-104. | | | |
| 105 | HMEGH46 | 1092158 | 115 | 2-547 | 713 | Asp-13 to Asp-19, | AR054: 29, AR051: | | |
| | | | | | | Lys-76 to Asp-84. | 12, AR061: 6, AR089: | | |
| | | | | | | | 3, AR050: 2 | | |
| | | | | | | | H0196: 1 and H0266: | | |
| | | | | | | | 1. | | |
| | | 887791 | 426 | 1-315 | 1024 | Asp-13 to Asp-19, | | | |
| | | | | | | Lys-76 to Asn-83. | | | |
| 106 | HE8PY29 | 1129488 | 116 | 2-277 | 714 | Asp-28 to Ser-36, | AR061: 2, AR089: 1 | | |
| | | | | | | Glu-47 to Gln-60, | H0013: 1 and S0126: 1. | | |
| | | | | | | Phe-68 to Gly-77, | | | |
| | | | | | | Pro-81 to Val-86. | | | |
| | | 887862 | 427 | 2-277 | 1025 | Asp-28 to Ser-36, | | | |
| | | | | | | Glu-47 to Gln-60, | | | |
| | | | | | | Phe-68 to Gly-77, | | | |
| | | | | | | Pro-81 to Val-86. | | | |
| 107 | HTDAB17 | 890384 | 117 | 3-605 | 715 | Asp-1 to Gly-14, | AR089: 1, AR061: 0 | 6p24-p23 | 125264, |
| | | | | | | Ala-60 to Lys-71, | L0747: 28, L0588: 22, | | 134570, |
| | | | | | | Gln-101 to Glu-118. | L0757: 19, H0251: 15, | | 600511, |
| | | | | | | | S0358: 14, S0045: 13, | | 601556 |
| | | | | | | | L0731: 12, H0551: 10, | | |
| | | | | | | | H0412: 10, L0771: 10, | | |
| | | | | | | | L0748: 9, L0758: 9, | | |
| | | | | | | | H0506: 9, H0556: 8, | | |
| | | | | | | | S0046: 8, H0622: 8, | | |
| | | | | | | | H0013: 7, H0623: 7, | | |
| | | | | | | | L0662: 7, S0192: 7, | | |
| | | | | | | | S0003: 6, L0659: 6, | | |
| | | | | | | | L0666: 6, S0328: 6, | | |
| | | | | | | | L0439: 6, L0750: 6, | | |
| | | | | | | | L0759: 6, L0599: 6, | | |
| | | | | | | | L0608: 6, S0040: 5, | | |
| | | | | | | | S0360: 5, H0581: 5, | | |
| | | | | | | | H0529: 5, L0763: 5, | | |
| | | | | | | | L0764: 5, L0664: 5, | | |
| | | | | | | | H0144: 5, S0026: 5, | | |
| | | | | | | | S0212: 4, H0486: 4, | | |
| | | | | | | | H0674: 4, L0776: 4, | | |
| | | | | | | | S0126: 4, H0672: 4, | | |
| | | | | | | | S0136: 4, L0752: 4, | | |
| | | | | | | | H0624: 3, S0420: 3, | | |
| | | | | | | | H0599: 3, H0004: 3, | | |
| | | | | | | | H0266: 3, H0615: 3, | | |
| | | | | | | | H0031: 3, H0553: 3, | | |
| | | | | | | | H0591: 3, H0264: 3, | | |
| | | | | | | | H0413: 3, H0494: 3, | | |
| | | | | | | | S0210: 3, L0770: 3, | | |
| | | | | | | | L0806: 3, H0519: 3, | | |
| | | | | | | | H0435: 3, L0740: 3, | | |
| | | | | | | | L0751: 3, L0749: 3, | | |
| | | | | | | | H0170: 2, H0657: 2, | | |
| | | | | | | | H0656: 2, S0356: 2, | | |
| | | | | | | | S0408: 2, H0619: 2, | | |
| | | | | | | | H0393: 2, H0333: 2, | | |
| | | | | | | | T0040: 2, H0427: 2, | | |
| | | | | | | | S0280: 2, H0156: 2, | | |
| | | | | | | | H0318: 2, H0596: 2, | | |
| | | | | | | | T0110: 2, H0545: 2, | | |
| | | | | | | | H0046: 2, H0009: 2, | | |
| | | | | | | | H0050: 2, L0471: 2, | | |
| | | | | | | | H0188: 2, H0328: 2, | | |
| | | | | | | | H0428: 2, L0483: 2, | | |
| | | | | | | | H0644: 2, H0038: 2, | | |
| | | | | | | | S0426: 2, L0772: 2, | | |
| | | | | | | | L0646: 2, L0766: 2, | | |
| | | | | | | | L0649: 2, L0651: 2, | | |
| | | | | | | | L0655: 2, L0789: 2, | | |
| | | | | | | | L0663: 2, L0665: 2, | | |
| | | | | | | | L0352: 2, H0658: 2, | | |
| | | | | | | | S0152: 2, H0521: 2, | | |
| | | | | | | | H0696: 2, S0404: 2, | | |
| | | | | | | | H0555: 2, S0028: 2, | | |
| | | | | | | | H0445: 2, L0591: 2, | | |
| | | | | | | | L0594: 2, H0543: 2, | | |
| | | | | | | | H0422: 2, H0171: 1, | | |
| | | | | | | | H0265: 1, S6024: 1, | | |
| | | | | | | | H0295: 1, T0049: 1, | | |
| | | | | | | | S0134: 1, H0661: 1, | | |
| | | | | | | | H0663: 1, H0664: 1, | | |
| | | | | | | | S0418: 1, L0005: 1, | | |
| | | | | | | | S0354: 1, S0376: 1, | | |
| | | | | | | | S0468: 1, H0351: 1, | | |
| | | | | | | | S0220: 1, H0431: 1, | | |
| | | | | | | | H0392: 1, H0403: 1, | | |
| | | | | | | | H0592: 1, H0587: 1, | | |
| | | | | | | | H0642: 1, H0574: 1, | | |
| | | | | | | | H0485: 1, L0021: 1, | | |
| | | | | | | | H0575: 1, H0274: 1, | | |
| | | | | | | | S0346: 1, T0048: 1, | | |
| | | | | | | | S0049: 1, H0434: 1, | | |
| | | | | | | | H0230: 1, H0196: 1, | | |
| | | | | | | | H0052: 1, H0263: 1, | | |
| | | | | | | | H0597: 1, H0572: 1, | | |
| | | | | | | | H0012: 1, H0620: 1, | | |
| | | | | | | | T0003: 1, H0024: 1, | | |
| | | | | | | | H0057: 1, H0051: 1, | | |
| | | | | | | | H0083: 1, H0510: 1, | | |
| | | | | | | | H0687: 1, H0288: 1, | | |
| | | | | | | | S0022: 1, H0039: 1, | | |
| | | | | | | | H0030: 1, H0628: 1, | | |
| | | | | | | | H0166: 1, H0212: 1, | | |
| | | | | | | | H0135: 1, H0163: 1, | | |
| | | | | | | | H0090: 1, H0040: 1, | | |
| | | | | | | | H0634: 1, H0087: 1, | | |
| | | | | | | | H0477: 1, H0488: 1, | | |
| | | | | | | | H0433: 1, H0268: 1, | | |
| | | | | | | | H0269: 1, H0056: 1, | | |
| | | | | | | | S0038: 1, H0100: 1, | | |
| | | | | | | | H0429: 1, S0450: 1, | | |
| | | | | | | | H0132: 1, H0633: 1, | | |
| | | | | | | | S0472: 1, H0647: 1, | | |
| | | | | | | | H0646: 1, H0652: 1, | | |
| | | | | | | | S0344: 1, L0640: 1, | | |
| | | | | | | | L0371: 1, L0372: 1, | | |
| | | | | | | | L0374: 1, L0767: 1, | | |
| | | | | | | | L0768: 1, L0364: 1, | | |
| | | | | | | | L0794: 1, L0650: 1, | | |
| | | | | | | | L0375: 1, L0378: 1, | | |
| | | | | | | | L0606: 1, L0656: 1, | | |
| | | | | | | | L0783: 1, L0647: 1, | | |
| | | | | | | | S0374: 1, T0068: 1, | | |
| | | | | | | | L0438: 1, H0547: 1, | | |
| | | | | | | | H0689: 1, H0711: 1, | | |
| | | | | | | | H0684: 1, H0659: 1, | | |
| | | | | | | | H0670: 1, H0648: 1, | | |
| | | | | | | | S0330: 1, S0378: 1, | | |
| | | | | | | | S0380: 1, H0709: 1, | | |
| | | | | | | | S0146: 1, S3012: 1, | | |
| | | | | | | | S0037: 1, S0206: 1, | | |
| | | | | | | | L0742: 1, L0744: 1, | | |
| | | | | | | | L0755: 1, H0707: 1, | | |
| | | | | | | | S0434: 1, S0436: 1, | | |
| | | | | | | | L0584: 1, L0593: 1, | | |
| | | | | | | | L0362: 1, S0011: 1, | | |
| | | | | | | | S0424: 1 and H0293: 1. | | |
| 108 | HCFCF47 | 1199931 | 118 | 1-780 | 716 | Arg-8 to Glu-15, | AR089: 14, AR061: 7 | | |
| | | | | | | Gln-49 to Ala-58, | H0341: 1 and H0422: | | |
| | | | | | | Gly-175 to Gly-182, | 1. | | |
| | | | | | | Arg-184 to Leu-191, | | | |
| | | | | | | Pro-198 to Phe-205. | | | |
| | | 894415 | 428 | 2-298 | 1026 | Arg-1 to Glu-8. | | | |
| 109 | HDQHB19 | 1194798 | 119 | 2-709 | 717 | Arg-1 to Thr-7, | AR061: 3, AR089: 3 | | |
| | | | | | | Pro-19 to Ala-25, | L0759: 12, L0439: 11, | | |
| | | | | | | Pro-56 to Leu-64, | L0766: 7, L0775: 5, | | |
| | | | | | | His-72 to Asn-81, | H0521: 5, L0755: 5, | | |
| | | | | | | Phe-184 to Pro-192, | L0748: 4, L0756: 4, | | |
| | | | | | | Pro-218 to Val-226, | L0777: 4, L0731: 4, | | |
| | | | | | | Ser-229 to Arg-236. | L0581: 4, L0619: 3, | | |
| | | | | | | | L0666: 3, L0779: 3, | | |
| | | | | | | | L0757: 3, L0588: 3, | | |
| | | | | | | | S0418: 2, L0618: 2, | | |
| | | | | | | | H0580: 2, L0055: 2, | | |
| | | | | | | | L0769: 2, L0773: 2, | | |
| | | | | | | | L0774: 2, L0791: 2, | | |
| | | | | | | | L0747: 2, L0750: 2, | | |
| | | | | | | | H0265: 1, H0663: 1, | | |
| | | | | | | | S0356: 1, H0208: 1, | | |
| | | | | | | | H0370: 1, H0108: 1, | | |
| | | | | | | | H0575: 1, H0618: 1, | | |
| | | | | | | | H0544: 1, H0545: 1, | | |
| | | | | | | | S0050: 1, H0510: 1, | | |
| | | | | | | | H0286: 1, H0031: 1, | | |
| | | | | | | | H0644: 1, H0068: 1, | | |
| | | | | | | | H0135: 1, L0564: 1, | | |
| | | | | | | | H0494: 1, L0475: 1, | | |
| | | | | | | | H0396: 1, S0144: 1, | | |
| | | | | | | | S0002: 1, S0426: 1, | | |
| | | | | | | | L0763: 1, L0761: 1, | | |
| | | | | | | | L0642: 1, L0764: 1, | | |
| | | | | | | | L0662: 1, L0768: 1, | | |
| | | | | | | | L0806: 1, L0661: 1, | | |
| | | | | | | | L0659: 1, L0367: 1, | | |
| | | | | | | | L0663: 1, H0519: 1, | | |
| | | | | | | | H0435: 1, H0658: 1, | | |
| | | | | | | | S3014: 1, L0751: 1, | | |
| | | | | | | | L0749: 1, L0603: 1, | | |
| | | | | | | | H0665: 1 and H0542: 1. | | |
| | | 895106 | 429 | 2-538 | 1027 | Pro-14 to Ala-20, | | | |
| | | | | | | Pro-51 to Leu-59, | | | |
| | | | | | | His-67 to Thr-77. | | | |
| 110 | HAGDN53 | 1129154 | 120 | 3-329 | 718 | Gln-22 to Lys-30, | AR050: 17, AR051: | | |
| | | | | | | Phe-40 to Tyr-49, | 11, AR054: 2, AR089: | | |
| | | | | | | Gln-70 to Trp-75, | 1, AR061: 0 | | |
| | | | | | | Arg-80 to Gln-87, | S0010: 1 and S0027: 1. | | |
| | | | | | | Gly-95 to Arg-101. | | | |
| | | 895963 | 430 | 129-428 | 1028 | Pro-9 to Gln-16, | | | |
| | | | | | | Phe-31 to Tyr-40, | | | |
| | | | | | | Gln-61 to Trp-66, | | | |
| | | | | | | Arg-71 to Gln-78, | | | |
| | | | | | | Gly-86 to Arg-92. | | | |
| 111 | HUFDB74 | 1162672 | 121 | 2-562 | 719 | Gln-43 to Thr-58, | AR061: 1, AR089: 1 | | |
| | | | | | | Asn-74 to His-79, | H0575: 2, L0754: 2, | | |
| | | | | | | Gly-109 to Trp-114, | H0599: 1, T0048: 1, | | |
| | | | | | | Asp-136 to Phe-145. | L0163: 1, H0051: 1, | | |
| | | | | | | | H0188: 1, H0379: 1, | | |
| | | | | | | | L0438: 1, H0670: 1, | | |
| | | | | | | | H0672: 1, L0439: 1, | | |
| | | | | | | | L0747: 1, S0260: 1, | | |
| | | | | | | | L0591: 1 and H0506: 1. | | |
| | | 901451 | 431 | 2-412 | 1029 | Gln-43 to Thr-58, | | | |
| | | | | | | Asn-74 to His-79, | | | |
| | | | | | | Gly-109 to Trp-114. | | | |
| 112 | HNHFH24 | 1092567 | 122 | 28-516 | 720 | His-8 to Gly-18, | AR054: 20, AR050: | | |
| | | | | | | Ala-39 to Gly-45, | 15, AR061: 7, AR089: | | |
| | | | | | | Pro-94 to Glu-101, | 4, AR051: 1 | | |
| | | | | | | Pro-134 to Gly-142. | S0053: 1 | | |
| | | 903741 | 432 | 28-480 | 1030 | His-8 to Gly-18, | | | |
| | | | | | | Ala-39 to Gly-45, | | | |
| | | | | | | Pro-94 to Glu-101. | | | |
| 113 | HBGQT03 | 1188175 | 123 | 11-790 | 721 | Glu-1 to Ala-12, | AR061: 6, AR089: 3 | | |
| | | | | | | Glu-19 to Val-28, | H0617: 10, L0665: 4, | | |
| | | | | | | Glu-34 to Thr-45, | H0333: 3, S0366: 3, | | |
| | | | | | | Leu-140 to Asp-157, | L0759: 3, H0599: 2, | | |
| | | | | | | Thr-167 to Ala-198, | L0648: 2, L0653: 2, | | |
| | | | | | | Ala-211 to Asp-216. | L0664: 2, H0519: 2, | | |
| | | | | | | | H0686: 1, H0484: 1, | | |
| | | | | | | | H0664: 1, H0392: 1, | | |
| | | | | | | | L0622: 1, S0280: 1, | | |
| | | | | | | | H0545: 1, T0010: 1, | | |
| | | | | | | | H0424: 1, H0031: 1, | | |
| | | | | | | | H0181: 1, H0708: 1, | | |
| | | | | | | | H0494: 1, H0633: 1, | | |
| | | | | | | | L0371: 1, L0764: 1, | | |
| | | | | | | | L0773: 1, L0768: 1, | | |
| | | | | | | | L0375: 1, L0651: 1, | | |
| | | | | | | | L0659: 1, L0783: 1, | | |
| | | | | | | | L0789: 1, L0438: 1, | | |
| | | | | | | | H0684: 1, H0670: 1, | | |
| | | | | | | | L0744: 1, L0780: 1, | | |
| | | | | | | | L0755: 1 and L0595: 1. | | |
| | | 908173 | 433 | 3-791 | 1031 | Lys-1 to Ala-15, | | | |
| | | | | | | Glu-22 to Val-31, | | | |
| | | | | | | Glu-37 to Thr-48, | | | |
| | | | | | | Leu-143 to Asp-160, | | | |
| | | | | | | Thr-170 to Ala-201, | | | |
| | | | | | | Ala-214 to Asp-219. | | | |
| 114 | HETLF29 | 1103959 | 124 | 3-482 | 722 | Asp-119 to Tyr-124. | AR061: 4, AR089: 2 | | |
| | | | | | | | H0046: 1 and L0758: | | |
| | | | | | | | 1. | | |
| | | 909762 | 434 | 3-416 | 1032 | | | | |
| 115 | HOUGD29 | 1204931 | 125 | 199-1821 | 723 | Arg-9 to Gln-17, | AR061: 6, AR089: 5 | | |
| | | | | | | Ile-33 to Asn-39, | L0770: 4, L0789: 3, | | |
| | | | | | | Gln-93 to Ser-104, | L0439: 3, L0750: 3, | | |
| | | | | | | Asp-141 to Leu-155, | L0641: 2, L0747: 2, | | |
| | | | | | | Ser-224 to Asn-234, | L0758: 2, S0040: 1, | | |
| | | | | | | Asn-243 to Lys-248, | H0575: 1, T0010: 1, | | |
| | | | | | | Ser-308 to Gln-320, | H0087: 1, S0422: 1, | | |
| | | | | | | Thr-350 to Glu-357, | L0803: 1, L0375: 1, | | |
| | | | | | | Ser-384 to Thr-390, | L0776: 1, L0659: 1, | | |
| | | | | | | Asp-435 to Ser-447, | L0783: 1, H0144: 1, | | |
| | | | | | | Ala-480 to Lys-487, | L0352: 1, H0684: 1, | | |
| | | | | | | Lys-496 to Leu-508, | H0660: 1, S0027: 1, | | |
| | | | | | | Ser-519 to Val-528, | L0777: 1 and H0445: 1. | | |
| | | | | | | Ser-533 to Gln-541. | | | |
| | | 909797 | 435 | 199-909 | 1033 | Arg-9 to Leu-15. | | | |
| 116 | HTEMV09 | 1128254 | 126 | 1-711 | 724 | Asp-22 to Asp-28, | AR089: 13, AR061: 13 | | |
| | | | | | | Leu-98 to Trp-103, | L0666: 3, L0758: 3, | | |
| | | | | | | Glu-123 to Trp-154, | H0616: 2, L0779: 2, | | |
| | | | | | | Pro-158 to Gln-178, | S0036: 1, L0598: 1, | | |
| | | | | | | Pro-180 to Met-189, | L0766: 1, L0651: 1, | | |
| | | | | | | Glu-207 to Lys-226, | L0806: 1, L0776: 1, | | |
| | | | | | | Ser-231 to Leu-237. | H0144: 1, H0547: 1, | | |
| | | | | | | | H0672: 1 and H0555: 1. | | |
| | | 909843 | 436 | 1-711 | 1034 | Asp-22 to Asp-28, | | | |
| | | | | | | Leu-98 to Trp-103, | | | |
| | | | | | | Glu-123 to Trp-154. | | | |
| 117 | HNTNB14 | 1128964 | 127 | 3-614 | 725 | Phe-2 to Gln-9, | AR089: 1, AR061: 1 | | |
| | | | | | | Arg-22 to Val-29, | S0007: 1, S0222: 1, | | |
| | | | | | | Glu-51 to Leu-64, | S0049: 1, L0438: 1, | | |
| | | | | | | Tyr-73 to Ile-83, | H0520: 1 and L0439: 1. | | |
| | | | | | | Glu-98 to Thr-104, | | | |
| | | | | | | Ala-119 to Asp-126, | | | |
| | | | | | | Arg-155 to Ser-161. | | | |
| | | 909942 | 437 | 2-658 | 1035 | Ala-2 to Gln-9, | | | |
| | | | | | | Arg-22 to Val-29, | | | |
| | | | | | | Glu-51 to Leu-64. | | | |
| 118 | HE2KZ07 | 1149808 | 128 | 708-166 | 726 | | AR061: 9, AR089: 4 | | |
| | | | | | | | H0624: 1 | | |
| | | 909948 | 438 | 2-796 | 1036 | Leu-10 to Gly-16, | | | |
| | | | | | | Pro-37 to Glu-45, | | | |
| | | | | | | Glu-78 to Cys-87. | | | |
| 119 | HSIGN57 | 1105444 | 129 | 3-974 | 727 | Val-10 to Gly-16, | AR061: 2, AR089: 1 | | |
| | | | | | | Met-19 to Val-34, | H0229: 1, H0590: 1, | | |
| | | | | | | Ala-84 to Asp-90, | S0049: 1, H0014: 1, | | |
| | | | | | | Met-107 to Trp-120, | H0560: 1, L0439: 1 and | | |
| | | | | | | Gln-191 to Ala-201, | H0543: 1. | | |
| | | | | | | Glu-223 to Val-229, | | | |
| | | | | | | Asn-309 to Gly-314. | | | |
| | | 910078 | 439 | 2-760 | 1037 | Val-10 to Gly-16, | | | |
| | | | | | | Met-19 to Val-34. | | | |
| 120 | HLHBC30 | 1106654 | 130 | 39-512 | 728 | Gln-7 to Glu-17, | AR061: 8, AR089: 5 | | |
| | | | | | | Thr-36 to Asn-42, | L0456: 3, H0024: 2 | | |
| | | | | | | Val-44 to Phe-49, | and L0747: 1. | | |
| | | | | | | Tyr-76 to Ile-85, | | | |
| | | | | | | Cys-94 to Glu-99, | | | |
| | | | | | | Pro-105 to Ser-110. | | | |
| | | 910079 | 440 | 39-512 | 1038 | Gln-7 to Glu-17. | | | |
| 121 | HFBDJ13 | 1195217 | 131 | 172-1368 | 729 | Ser-45 to Glu-53, | S0007: 2, L0794: 2, | | |
| | | | | | | Ile-78 to Asn-94, | S0434: 2, S0354: 1, | | |
| | | | | | | Leu-99 to Ser-104, | N0006: 1, H0622: 1 and | | |
| | | | | | | Ser-110 to Trp-128, | H0478: 1. | | |
| | | | | | | Tyr-145 to Gly-153, | | | |
| | | | | | | Gln-168 to Trp-173, | | | |
| | | | | | | Leu-196 to Ala-205. | | | |
| | | 911264 | 441 | 3-410 | 1039 | Ser-6 to Trp-24. | | | |
| 122 | HTPGG25 | 1217208 | 132 | 786-1628 | 730 | Glu-29 to Arg-35, | AR061: 2, AR089: 2 | | |
| | | | | | | Arg-50 to Leu-55, | L0439: 6, L0777: 6, | | |
| | | | | | | Leu-60 to Ser-69, | H0052: 4, L0748: 4, | | |
| | | | | | | Lys-102 to Asp-108, | H0634: 3, L0662: 3, | | |
| | | | | | | Pro-227 to Glu-233, | L0805: 3, L0659: 3, | | |
| | | | | | | Leu-249 to Glu-261. | L0438: 3, H0547: 3, | | |
| | | | | | | | L0750: 3, L0758: 3, | | |
| | | | | | | | H0208: 2, H0123: 2, | | |
| | | | | | | | H0014: 2, H0617: 2, | | |
| | | | | | | | H0135: 2, L0769: 2, | | |
| | | | | | | | L0766: 2, L0803: 2, | | |
| | | | | | | | L0776: 2, L0666: 2, | | |
| | | | | | | | L0751: 2, L0745: 2, | | |
| | | | | | | | L0731: 2, H0265: 1, | | |
| | | | | | | | S0408: 1, H0549: 1, | | |
| | | | | | | | H0497: 1, L0622: 1, | | |
| | | | | | | | H0581: 1, H0194: 1, | | |
| | | | | | | | L0738: 1, H0546: 1, | | |
| | | | | | | | H0024: 1, S0362: 1, | | |
| | | | | | | | L0163: 1, T0010: 1, | | |
| | | | | | | | H0083: 1, H0510: 1, | | |
| | | | | | | | H0266: 1, H0428: 1, | | |
| | | | | | | | H0622: 1, H0673: 1, | | |
| | | | | | | | H0598: 1, S0036: 1, | | |
| | | | | | | | H0163: 1, H0413: 1, | | |
| | | | | | | | L0370: 1, T0041: 1, | | |
| | | | | | | | H0647: 1, L0637: 1, | | |
| | | | | | | | L0667: 1, L0772: 1, | | |
| | | | | | | | L0646: 1, L0800: 1, | | |
| | | | | | | | L0764: 1, L0649: 1, | | |
| | | | | | | | L0657: 1, L0809: 1, | | |
| | | | | | | | L0788: 1, L0663: 1, | | |
| | | | | | | | S0374: 1, H0520: 1, | | |
| | | | | | | | H0670: 1, H0666: 1, | | |
| | | | | | | | S0330: 1, H0539: 1, | | |
| | | | | | | | H0521: 1, H0696: 1, | | |
| | | | | | | | H0478: 1, S0028: 1, | | |
| | | | | | | | L0741: 1, L0747: 1, | | |
| | | | | | | | L0749: 1, L0780: 1, | | |
| | | | | | | | L0752: 1 and H0543: 1. | | |
| | | 911282 | 442 | 3-392 | 1040 | Pro-3 to Arg-8. | | | |
| 123 | HSSMT34 | 911294 | 133 | 56-553 | 731 | Glu-29 to Arg-35, | AR061: 4, AR089: 3 | | |
| | | | | | | Arg-50 to Leu-55, | L0439: 6, L0777: 6, | | |
| | | | | | | Leu-60 to Ser-69, | H0052: 4, L0748: 4, | | |
| | | | | | | Lys-102 to Asp-108, | H0634: 3, L0662: 3, | | |
| | | | | | | Pro-133 to Gln-141. | L0805: 3, L0659: 3, | | |
| | | | | | | | L0438: 3, H0547: 3, | | |
| | | | | | | | L0750: 3, L0758: 3, | | |
| | | | | | | | H0208: 2, H0123: 2, | | |
| | | | | | | | H0014: 2, H0617: 2, | | |
| | | | | | | | H0135: 2, L0769: 2, | | |
| | | | | | | | L0766: 2, L0803: 2, | | |
| | | | | | | | L0776: 2, L0666: 2, | | |
| | | | | | | | L0751: 2, L0745: 2, | | |
| | | | | | | | L0731: 2, H0265: 1, | | |
| | | | | | | | S0408: 1, H0549: 1, | | |
| | | | | | | | H0497: 1, L0622: 1, | | |
| | | | | | | | H0581: 1, H0194: 1, | | |
| | | | | | | | L0738: 1, H0546: 1, | | |
| | | | | | | | H0024: 1, S0362: 1, | | |
| | | | | | | | L0163: 1, T0010: 1, | | |
| | | | | | | | H0083: 1, H0510: 1, | | |
| | | | | | | | H0266: 1, H0428: 1, | | |
| | | | | | | | H0622: 1, H0673: 1, | | |
| | | | | | | | H0598: 1, S0036: 1, | | |
| | | | | | | | H0163: 1, H0413: 1, | | |
| | | | | | | | L0370: 1, T0041: 1, | | |
| | | | | | | | H0647: 1, L0637: 1, | | |
| | | | | | | | L0667: 1, L0772: 1, | | |
| | | | | | | | L0646: 1, L0800: 1, | | |
| | | | | | | | L0764: 1, L0649: 1, | | |
| | | | | | | | L0657: 1, L0809: 1, | | |
| | | | | | | | L0788: 1, L0663: 1, | | |
| | | | | | | | S0374: 1, H0520: 1, | | |
| | | | | | | | H0670: 1, H0666: 1, | | |
| | | | | | | | S0330: 1, H0539: 1, | | |
| | | | | | | | H0521: 1, H0696: 1, | | |
| | | | | | | | H0478: 1, S0028: 1, | | |
| | | | | | | | L0741: 1, L0747: 1, | | |
| | | | | | | | L0749: 1, L0780: 1, | | |
| | | | | | | | L0752: 1 and H0543: 1. | | |
| 124 | HWWDN34 | 1152430 | 134 | 2-1012 | 732 | Ser-15 to Leu-21, | AR089: 1, AR061: 1 | | |
| | | | | | | Pro-24 to Val-30, | S0354: 16, H0457: 7, | | |
| | | | | | | Ser-91 to Lys-99, | L0758: 3, H0555: 2, | | |
| | | | | | | Thr-113 to Lys-120, | H0170: 1, H0657: 1, | | |
| | | | | | | Pro-168 to Gln-174, | H0255: 1, H0662: 1, | | |
| | | | | | | Glu-226 to Ser-231, | S0360: 1, H0036: 1, | | |
| | | | | | | Ser-296 to Gln-307, | H0150: 1, H0051: 1, | | |
| | | | | | | Asp-319 to Gly-328, | H0553: 1, L0800: 1, | | |
| | | | | | | Gly-330 to Ala-337. | L0644: 1, L0771: 1, | | |
| | | | | | | | L0803: 1, L0787: 1, | | |
| | | | | | | | L0663: 1, H0144: 1, | | |
| | | | | | | | S0374: 1, H0670: 1, | | |
| | | | | | | | H0522: 1, L0749: 1, | | |
| | | | | | | | S0452: 1 and H0506: 1. | | |
| | | 911357 | 443 | 2-1000 | 1041 | Ser-11 to Leu-17, | | | |
| | | | | | | Pro-20 to Val-26, | | | |
| | | | | | | Ser-87 to Lys-95, | | | |
| | | | | | | Thr-109 to Lys-116, | | | |
| | | | | | | Pro-164 to Gln-170, | | | |
| | | | | | | Glu-222 to Ser-227, | | | |
| | | | | | | Ser-292 to Gln-303, | | | |
| | | | | | | Asp-315 to Gly-324, | | | |
| | | | | | | Gly-326 to Ala-333. | | | |
| 125 | HCEPW85 | 911374 | 135 | 3-314 | 733 | Thr-2 to Gln-7. | H0052: 1 and L0471: | | |
| | | | | | | | 1. | | |
| 126 | HMTAW83 | 1071602 | 136 | 1-363 | 734 | Ile-26 to Trp-33, | AR089: 0, AR061: 0 | | |
| | | | | | | Glu-52 to Leu-71. | H0583: 1, H0644: 1, | | |
| | | | | | | | L0766: 1 and H0518: 1. | | |
| | | 911385 | 444 | 1-363 | 1042 | Ile-26 to Trp-33, | | | |
| | | | | | | Glu-52 to Leu-71. | | | |
| 127 | HDMAV01 | 1194697 | 137 | 1-657 | 735 | Pro-1 to Glu-15, | AR089: 2, AR061: 2 | | |
| | | | | | | Ala-26 to Lys-32, | L0766: 5, L0776: 5, | | |
| | | | | | | Glu-46 to Leu-65, | L0754: 4, H0013: 3, | | |
| | | | | | | Arg-82 to Cys-94, | S0126: 3, L0742: 3, | | |
| | | | | | | Leu-101 to Glu-107, | L0750: 3, H0624: 2, | | |
| | | | | | | Leu-146 to Asp-151, | S0360: 2, H0560: 2, | | |
| | | | | | | Gln-157 to Ser-162, | L0769: 2, L0641: 2, | | |
| | | | | | | Ser-165 to Ala-187, | L0665: 2, S0330: 2, | | |
| | | | | | | Phe-210 to Leu-217. | L0756: 2, L0731: 2, | | |
| | | | | | | | L0759: 2, L0588: 2, | | |
| | | | | | | | H0171: 1, H0650: 1, | | |
| | | | | | | | H0402: 1, H0638: 1, | | |
| | | | | | | | H0340: 1, H0637: 1, | | |
| | | | | | | | H0351: 1, S0222: 1, | | |
| | | | | | | | H0581: 1, H0263: 1, | | |
| | | | | | | | H0545: 1, H0050: 1, | | |
| | | | | | | | S0051: 1, S0214: 1, | | |
| | | | | | | | H0039: 1, L0055: 1, | | |
| | | | | | | | H0090: 1, H0412: 1, | | |
| | | | | | | | H0022: 1, H0359: 1, | | |
| | | | | | | | H0561: 1, H0641: 1, | | |
| | | | | | | | L0770: 1, L0637: 1, | | |
| | | | | | | | L0646: 1, L0764: 1, | | |
| | | | | | | | L0773: 1, L0662: 1, | | |
| | | | | | | | L0768: 1, L0651: 1, | | |
| | | | | | | | L0653: 1, L0659: 1, | | |
| | | | | | | | L0792: 1, H0519: 1, | | |
| | | | | | | | H0522: 1, H0576: 1, | | |
| | | | | | | | S0028: 1, L0439: 1, | | |
| | | | | | | | L0740: 1, L0749: 1, | | |
| | | | | | | | L0777: 1, H0444: 1, | | |
| | | | | | | | L0596: 1, L0601: 1, | | |
| | | | | | | | H0542: 1 and H0543: 1. | | |
| | | 911386 | 445 | 3-428 | 1043 | Asp-1 to Glu-11, | | | |
| | | | | | | Ala-22 to Lys-28, | | | |
| | | | | | | Glu-42 to Leu-61, | | | |
| | | | | | | Arg-78 to Cys-90, | | | |
| | | | | | | Leu-97 to Glu-103. | | | |
| 128 | HDPSR74 | 911396 | 138 | 212-583 | 736 | Leu-31 to Ser-39, | AR050: 48, AR054: | | |
| | | | | | | Val-57 to Trp-63, | 42, AR051: 35, AR089: | | |
| | | | | | | Pro-103 to Gln-111, | 3, AR061: 1 | | |
| | | | | | | Leu-118 to Leu-124. | H0575: 2, H0580: 1, | | |
| | | | | | | | S0002: 1, S0426: 1, | | |
| | | | | | | | H0521: 1, H0436: 1 and | | |
| | | | | | | | L0748: 1. | | |
| 129 | HHEZT58 | 1160657 | 139 | 1212-937 | 737 | Pro-4 to His-21, | AR089: 8, AR061: 3 | | |
| | | | | | | Glu-35 to Gln-43. | L0794: 3, L0758: 2, | | |
| | | | | | | | L0759: 2, H0624: 1, | | |
| | | | | | | | L0717: 1, T0082: 1, | | |
| | | | | | | | H0581: 1, H0553: 1, | | |
| | | | | | | | H0038: 1, T0067: 1, | | |
| | | | | | | | L0665: 1, H0436: 1, | | |
| | | | | | | | L0439: 1, L0745: 1 and | | |
| | | | | | | | H0543: 1. | | |
| | | 911416 | 446 | 1-558 | 1044 | Glu-9 to Lys-14, | | | |
| | | | | | | Gln-51 to Gln-57. | | | |
| 130 | HTLDU05 | 911649 | 140 | 2-469 | 738 | Pro-89 to Ala-97. | AR061: 8, AR089: 7 | 9q31 | 109400, |
| | | | | | | | H0253: 3, H0618: 1 | | 132800, |
| | | | | | | | and L0758: 1. | | 132800, |
| | | | | | | | | | 186855, |
| | | | | | | | | | 223900, |
| | | | | | | | | | 253800, |
| | | | | | | | | | 253800, |
| | | | | | | | | | 278700, |
| | | | | | | | | | 602088 |
| 131 | HTLET56 | 1189721 | 141 | 144-1211 | 739 | Ser-54 to Lys-61, | AR061: 6, AR089: 5 | | |
| | | | | | | Pro-118 to Lys-128, | H0253: 18, H0618: 7, | | |
| | | | | | | Pro-233 to Val-244, | L0794: 3, H0038: 1, | | |
| | | | | | | Leu-262 to Ser-270, | H0616: 1, L0788: 1 and | | |
| | | | | | | Ser-322 to Gly-344, | L0758: 1. | | |
| | | | | | | Pro-347 to Ser-353. | | | |
| | | 911654 | 447 | 95-826 | 1045 | Ser-54 to Lys-61, | | | |
| | | | | | | Pro-118 to Lys-128, | | | |
| | | | | | | Thr-208 to Ser-213, | | | |
| | | | | | | Ser-218 to Ala-227, | | | |
| | | | | | | Pro-230 to Ser-236, | | | |
| | | | | | | Pro-238 to Ser-244. | | | |
| 132 | HTLCA95 | 911655 | 142 | 38-1096 | 740 | | AR061: 373, AR089: | | |
| | | | | | | | 188 | | |
| | | | | | | | H0253: 3, H0618: 2, | | |
| | | | | | | | H0038: 2, H0616: 1 and | | |
| | | | | | | | L0758: 1. | | |
| 133 | HTEJT86 | 1090517 | 143 | 1-1119 | 741 | Ala-39 to Ala-45, | AR089: 1, AR061: 1 | | |
| | | | | | | Gln-57 to Ser-63, | L0794: 3, H0038: 2, | | |
| | | | | | | Tyr-90 to Lys-95, | H0265: 1, S0358: 1, | | |
| | | | | | | Leu-113 to Ile-119. | T0039: 1, H0616: 1, | | |
| | | | | | | | L0768: 1, L0804: 1, | | |
| | | | | | | | L0664: 1, L0777: 1, | | |
| | | | | | | | L0731: 1, L0758: 1 and | | |
| | | | | | | | L0465: 1. | | |
| | | 911656 | 448 | 1-411 | 1046 | Ala-39 to Ala-45, | | | |
| | | | | | | Gln-57 to Ser-63, | | | |
| | | | | | | Tyr-90 to Lys-95. | | | |
| 134 | HTEMA54 | 1134919 | 144 | 22-1359 | 742 | Gly-23 to Asn-30, | AR089: 19, AR061: 13 | | |
| | | | | | | Thr-58 to Val-79, | H0618: 14, H0253: 12, | | |
| | | | | | | Arg-101 to Ile-106, | H0038: 11, H0616: 2, | | |
| | | | | | | Thr-117 to Glu-126, | L0794: 1, L0779: 1 and | | |
| | | | | | | Pro-184 to Lys-193, | L0758: 1. | | |
| | | | | | | Ile-298 to Val-303, | | | |
| | | | | | | Phe-381 to Leu-389. | | | |
| | | 911666 | 449 | 22-1167 | 1047 | Gly-23 to Asn-30, | | | |
| | | | | | | Arg-45 to Lys-50. | | | |
| 135 | HTLGJ17 | 1135518 | 145 | 216-587 | 743 | Gly-35 to Ser-44. | AR089: 18, AR061: 5 | | |
| | | | | | | | H0618: 5, H0549: 1 | | |
| | | | | | | | and H0543: 1. | | |
| | | 915136 | 450 | 93-464 | 1048 | Val-6 to Arg-12. | | | |
| 136 | HOUES64 | 918119 | 146 | 3-317 | 744 | Pro-89 to Leu-102. | AR061: 1, AR089: 0 | | |
| | | | | | | | S0040: 1 and S0278: 1. | | |
| 137 | HMSCD15 | 982250 | 147 | 507-1 | 745 | Asp-16 to Gln-22, | AR089: 1, AR061: 1 | | |
| | | | | | | Val-44 to Ser-57. | S0002: 2 and L0766: 1. | | |
| | | 918133 | 451 | 237-635 | 1049 | | | | |
| 138 | HDQDX20 | 1223474 | 148 | 228-1715 | 746 | Met-7 to Ser-12, | AR089: 30, AR061: 4 | | |
| | | | | | | Ser-20 to Arg-30, | H0521: 3, H0051: 2, | | |
| | | | | | | Asp-85 to Ala-92, | L0756: 2, H0590: 1, | | |
| | | | | | | Met-119 to Asn-146, | S0250: 1, L0772: 1, | | |
| | | | | | | Pro-151 to Asp-161, | H0522: 1, S0406: 1 and | | |
| | | | | | | Gln-253 to Glu-260, | L0748: 1. | | |
| | | | | | | Ile-333 to Val-342, | | | |
| | | | | | | Leu-396 to Ala-406. | | | |
| | | 919027 | 452 | 210-1037 | 1050 | Met-7 to Ser-12, | | | |
| | | | | | | Ser-20 to Arg-30, | | | |
| | | | | | | Asp-85 to Ala-92, | | | |
| | | | | | | Met-119 to Asn-146, | | | |
| | | | | | | Pro-151 to Asp-161. | | | |
| 139 | HLTHP86 | 1110457 | 149 | 3-1352 | 747 | His-35 to Glu-44, | AR089: 1, AR061: 1 | | |
| | | | | | | Lys-88 to Tyr-94, | L0439: 3, L0438: 2, | | |
| | | | | | | Asp-140 to Ser-152, | S0028: 2, H0656: 1, | | |
| | | | | | | Leu-166 to Lys-171, | H0645: 1, H0369: 1, | | |
| | | | | | | Glu-183 to Glu-197, | S0222: 1, S0346: 1, | | |
| | | | | | | Glu-210 to Leu-217, | H0328: 1, H0029: 1, | | |
| | | | | | | Pro-231 to Gln-236. | H0644: 1, H0169: 1, | | |
| | | | | | | | H0591: 1, H0646: 1, | | |
| | | | | | | | H0520: 1, H0539: 1, | | |
| | | | | | | | L0746: 1 and L0366: 1. | | |
| | | 919354 | 453 | 3-1310 | 1051 | | | | |
| 140 | HMSOL52 | 1182715 | 150 | 1146-832 | 748 | Ser-1 to Gly-12, | AR061: 5, AR089: 2 | | |
| | | | | | | Arg-30 to Pro-36, | L0770: 4, L0803: 4, | | |
| | | | | | | Thr-65 to Met-76, | H0638: 1, H0123: 1, | | |
| | | | | | | Pro-86 to Asp-95. | S0426: 1, L0662: 1, | | |
| | | | | | | | H0648: 1, L0747: 1, | | |
| | | | | | | | L0756: 1, L0779: 1, | | |
| | | | | | | | L0752: 1 and L0759: 1. | | |
| | | 921126 | 454 | 90-473 | 1052 | Glu-29 to Gly-35, | | | |
| | | | | | | Arg-53 to Pro-59, | | | |
| | | | | | | Thr-88 to Met-99, | | | |
| | | | | | | Pro-109 to Asp-118. | | | |
| 141 | HAHGD33 | 1219819 | 151 | 3-1745 | 749 | Gly-59 to Ser-68, | AR061: 7, AR089: 5 | | |
| | | | | | | Ala-87 to Glu-98, | H0039: 5, H0622: 5, | | |
| | | | | | | Pro-106 to Asn-121, | L0748: 4, H0667: 4, | | |
| | | | | | | Ser-148 to Lys-159, | H0255: 3, S0126: 3, | | |
| | | | | | | Phe-207 to Ala-222, | H0393: 2, S0278: 2, | | |
| | | | | | | Cys-279 to Asn-285, | H0599: 2, H0618: 2, | | |
| | | | | | | Gly-322 to Pro-330, | H0318: 2, H0123: 2, | | |
| | | | | | | Glu-357 to Ala-364, | H0050: 2, H0179: 2, | | |
| | | | | | | Ile-402 to Asp-407, | H0271: 2, S0036: 2, | | |
| | | | | | | Pro-456 to Val-466, | H0135: 2, H0634: 2, | | |
| | | | | | | Ser-474 to Thr-487. | H0087: 2, H0100: 2, | | |
| | | | | | | | H0633: 2, S0210: 2, | | |
| | | | | | | | S0002: 2, H0144: 2, | | |
| | | | | | | | L0438: 2, L0602: 2, | | |
| | | | | | | | L0744: 2, L0731: 2, | | |
| | | | | | | | L0595: 2, L0601: 2, | | |
| | | | | | | | H0665: 2, H0542: 2, | | |
| | | | | | | | H0556: 1, H0222: 1, | | |
| | | | | | | | H0294: 1, H0583: 1, | | |
| | | | | | | | H0650: 1, H0657: 1, | | |
| | | | | | | | H0484: 1, H0306: 1, | | |
| | | | | | | | S0418: 1, S0420: 1, | | |
| | | | | | | | S0354: 1, H0580: 1, | | |
| | | | | | | | S0007: 1, S0046: 1, | | |
| | | | | | | | H0619: 1, H0550: 1, | | |
| | | | | | | | H0392: 1, H0586: 1, | | |
| | | | | | | | H0333: 1, H0486: 1, | | |
| | | | | | | | H0122: 1, H0196: 1, | | |
| | | | | | | | H0597: 1, H0544: 1, | | |
| | | | | | | | H0009: 1, H0172: 1, | | |
| | | | | | | | L0471: 1, H0023: 1, | | |
| | | | | | | | H0071: 1, H0266: 1, | | |
| | | | | | | | H0290: 1, H0553: 1, | | |
| | | | | | | | H0628: 1, H0551: 1, | | |
| | | | | | | | H0056: 1, H0623: 1, | | |
| | | | | | | | S0038: 1, H0494: 1, | | |
| | | | | | | | H0625: 1, H0561: 1, | | |
| | | | | | | | H0386: 1, H0509: 1, | | |
| | | | | | | | H0131: 1, H0130: 1, | | |
| | | | | | | | H0646: 1, S0144: 1, | | |
| | | | | | | | S0426: 1, H0529: 1, | | |
| | | | | | | | L0565: 1, H0547: 1, | | |
| | | | | | | | H0689: 1, H0435: 1, | | |
| | | | | | | | H0670: 1, S0330: 1, | | |
| | | | | | | | H0521: 1, S0027: 1, | | |
| | | | | | | | S0028: 1, S0032: 1, | | |
| | | | | | | | L0439: 1, L0747: 1, | | |
| | | | | | | | L0759: 1, S0260: 1, | | |
| | | | | | | | H0445: 1, L0597: 1, | | |
| | | | | | | | L0604: 1, L0593: 1, | | |
| | | | | | | | L0366: 1, H0668: 1, | | |
| | | | | | | | S0242: 1 and H0422: 1. | | |
| | | 921782 | 455 | 1-1020 | 1053 | Phe-22 to Ala-37, | | | |
| | | | | | | Cys-94 to Asn-100, | | | |
| | | | | | | Gly-137 to Pro-145, | | | |
| | | | | | | Glu-172 to Ala-179, | | | |
| | | | | | | Ile-217 to Asp-222. | | | |
| 142 | HHEHC53 | 921783 | 152 | 3-908 | 750 | Gly-59 to Ser-68, | AR089: 3, AR061: 2 | 19p | |
| | | | | | | Ala-87 to Glu-98, | L0748: 8, H0039: 5, | | |
| | | | | | | Pro-106 to Asn-121, | H0622: 5, L0664: 5, | | |
| | | | | | | Ser-148 to Lys-159, | L0439: 5, L0779: 5, | | |
| | | | | | | Phe-207 to Ala-222, | L0731: 5, L0758: 5, | | |
| | | | | | | Ile-284 to Lys-289. | L0665: 4, L0744: 4, | | |
| | | | | | | | L0601: 4, H0667: 4, | | |
| | | | | | | | H0255: 3, H0618: 3, | | |
| | | | | | | | L0666: 3, L0438: 3, | | |
| | | | | | | | S0126: 3, L0602: 3, | | |
| | | | | | | | L0742: 3, L0604: 3, | | |
| | | | | | | | L0595: 3, H0542: 3, | | |
| | | | | | | | H0265: 2, S0358: 2, | | |
| | | | | | | | H0393: 2, S0278: 2, | | |
| | | | | | | | H0550: 2, H0333: 2, | | |
| | | | | | | | H0599: 2, H0318: 2, | | |
| | | | | | | | H0545: 2, H0123: 2, | | |
| | | | | | | | H0050: 2, H0620: 2, | | |
| | | | | | | | H0179: 2, H0271: 2, | | |
| | | | | | | | S0036: 2, H0135: 2, | | |
| | | | | | | | H0634: 2, H0087: 2, | | |
| | | | | | | | H0100: 2, H0633: 2, | | |
| | | | | | | | S0210: 2, S0002: 2, | | |
| | | | | | | | L0769: 2, L0646: 2, | | |
| | | | | | | | L0768: 2, L0774: 2, | | |
| | | | | | | | H0144: 2, L0565: 2, | | |
| | | | | | | | H0689: 2, S0027: 2, | | |
| | | | | | | | L0747: 2, L0755: 2, | | |
| | | | | | | | L0593: 2, H0665: 2, | | |
| | | | | | | | H0556: 1, T0002: 1, | | |
| | | | | | | | H0222: 1, H0685: 1, | | |
| | | | | | | | H0294: 1, S0430: 1, | | |
| | | | | | | | H0583: 1, H0650: 1, | | |
| | | | | | | | H0657: 1, S0212: 1, | | |
| | | | | | | | S0282: 1, H0484: 1, | | |
| | | | | | | | H0306: 1, S0418: 1, | | |
| | | | | | | | S0420: 1, S0354: 1, | | |
| | | | | | | | S0360: 1, H0580: 1, | | |
| | | | | | | | S0007: 1, S0046: 1, | | |
| | | | | | | | H0619: 1, H0351: 1, | | |
| | | | | | | | H0549: 1, H0392: 1, | | |
| | | | | | | | H0586: 1, H0486: 1, | | |
| | | | | | | | T0060: 1, L0022: 1, | | |
| | | | | | | | H0122: 1, H0196: 1, | | |
| | | | | | | | H0597: 1, H0544: 1, | | |
| | | | | | | | H0009: 1, H0172: 1, | | |
| | | | | | | | L0471: 1, H0023: 1, | | |
| | | | | | | | H0071: 1, H0266: 1, | | |
| | | | | | | | H0290: 1, S0022: 1, | | |
| | | | | | | | H0030: 1, H0553: 1, | | |
| | | | | | | | H0628: 1, H0182: 1, | | |
| | | | | | | | H0617: 1, H0606: 1, | | |
| | | | | | | | H0551: 1, H0413: 1, | | |
| | | | | | | | H0056: 1, H0623: 1, | | |
| | | | | | | | S0038: 1, H0494: 1, | | |
| | | | | | | | H0625: 1, H0561: 1, | | |
| | | | | | | | H0386: 1, H0509: 1, | | |
| | | | | | | | H0131: 1, H0130: 1, | | |
| | | | | | | | H0646: 1, S0144: 1, | | |
| | | | | | | | S0344: 1, S0426: 1, | | |
| | | | | | | | H0529: 1, L0763: 1, | | |
| | | | | | | | L0770: 1, L0637: 1, | | |
| | | | | | | | L0372: 1, L0662: 1, | | |
| | | | | | | | L0775: 1, L0776: 1, | | |
| | | | | | | | L0659: 1, L0383: 1, | | |
| | | | | | | | L0790: 1, H0547: 1, | | |
| | | | | | | | H0435: 1, H0658: 1, | | |
| | | | | | | | H0670: 1, S0330: 1, | | |
| | | | | | | | H0521: 1, H0436: 1, | | |
| | | | | | | | S0390: 1, S0028: 1, | | |
| | | | | | | | S0032: 1, L0750: 1, | | |
| | | | | | | | L0753: 1, L0757: 1, | | |
| | | | | | | | L0759: 1, S0260: 1, | | |
| | | | | | | | H0445: 1, H0595: 1, | | |
| | | | | | | | L0597: 1, L0366: 1, | | |
| | | | | | | | H0668: 1, S0242: 1, | | |
| | | | | | | | H0423: 1, H0422: 1 and | | |
| | | | | | | | H0352: 1. | | |
| 143 | HE2PB01 | 1206665 | 153 | 695-1228 | 751 | Arg-1 to Asn-12, | AR061: 9, AR089: 6 | | |
| | | | | | | Leu-87 to Gln-92, | L0754: 6, H0318: 3, | | |
| | | | | | | Phe-111 to Ser-117, | H0486: 2, H0013: 2, | | |
| | | | | | | Arg-161 to Gly-168. | H0014: 2, L0439: 2, | | |
| | | | | | | | L0777: 2, H0543: 2, | | |
| | | | | | | | H0171: 1, H0556: 1, | | |
| | | | | | | | S6024: 1, H0583: 1, | | |
| | | | | | | | H0650: 1, H0638: 1, | | |
| | | | | | | | S0354: 1, H0580: 1, | | |
| | | | | | | | H0619: 1, H0455: 1, | | |
| | | | | | | | H0009: 1, S0003: 1, | | |
| | | | | | | | L0483: 1, S0036: 1, | | |
| | | | | | | | H0591: 1, H0494: 1, | | |
| | | | | | | | S0014: 1, S0450: 1, | | |
| | | | | | | | L0520: 1, L0763: 1, | | |
| | | | | | | | L0769: 1, L0641: 1, | | |
| | | | | | | | L0521: 1, L0662: 1, | | |
| | | | | | | | L0803: 1, L0774: 1, | | |
| | | | | | | | L0776: 1, L0783: 1, | | |
| | | | | | | | L0663: 1, H0144: 1, | | |
| | | | | | | | H0520: 1, H0547: 1, | | |
| | | | | | | | H0519: 1, S0136: 1, | | |
| | | | | | | | H0521: 1, H0522: 1, | | |
| | | | | | | | H0478: 1, L0742: 1, | | |
| | | | | | | | L0780: 1, L0592: 1, | | |
| | | | | | | | S0011: 1, S0192: 1, | | |
| | | | | | | | S0424: 1 and H0506: 1. | | |
| | | 921850 | 456 | 2-691 | 1054 | Glu-1 to Gly-7, | | | |
| | | | | | | Gln-43 to Arg-50, | | | |
| | | | | | | Asp-60 to Gly-67, | | | |
| | | | | | | Phe-150 to Glu-156, | | | |
| | | | | | | Arg-176 to Lys-181. | | | |
| 144 | HOUDP52 | 1219522 | 154 | 3-1361 | 752 | Lys-54 to Arg-60. | AR061: 2, AR089: 1 | | |
| | | | | | | | L0794: 7, L0743: 2, | | |
| | | | | | | | H0543: 2, S0040: 1, | | |
| | | | | | | | S0134: 1, S0356: 1, | | |
| | | | | | | | T0082: 1, H0251: 1, | | |
| | | | | | | | H0494: 1, H0625: 1, | | |
| | | | | | | | H0649: 1, L0806: 1, | | |
| | | | | | | | L0657: 1, L0565: 1, | | |
| | | | | | | | L0758: 1, L0608: 1 and | | |
| | | | | | | | S0026: 1. | | |
| | | 922102 | 457 | 196-1104 | 1055 | | | | |
| 145 | HHGAE47 | 1127881 | 155 | 2-517 | 753 | Gly-1 to Arg-19, | AR061: 3, AR089: 2 | | |
| | | | | | | Asp-27 to Glu-34, | L0769: 5, L0774: 5, | | |
| | | | | | | Asp-40 to Lys-46, | L0756: 4, H0624: 2, | | |
| | | | | | | Pro-63 to Arg-70, | S0358: 2, S0444: 2, | | |
| | | | | | | Lys-97 to Lys-103, | S0408: 2, H0587: 2, | | |
| | | | | | | Asp-113 to Gly-118, | L0764: 2, L0766: 2, | | |
| | | | | | | Ala-148 to Tyr-158. | L0775: 2, L0601: 2, | | |
| | | | | | | | H0170: 1, S0442: 1, | | |
| | | | | | | | S0410: 1, H0497: 1, | | |
| | | | | | | | H0333: 1, H0632: 1, | | |
| | | | | | | | H0156: 1, L0022: 1, | | |
| | | | | | | | L0738: 1, H0271: 1, | | |
| | | | | | | | H0039: 1, S0344: 1, | | |
| | | | | | | | L0637: 1, L0772: 1, | | |
| | | | | | | | L0646: 1, L0773: 1, | | |
| | | | | | | | L0662: 1, L0518: 1, | | |
| | | | | | | | L0783: 1, L0791: 1, | | |
| | | | | | | | L0663: 1, S0374: 1, | | |
| | | | | | | | H0593: 1, H0660: 1, | | |
| | | | | | | | H0648: 1, H0672: 1, | | |
| | | | | | | | H0696: 1, L0749: 1, | | |
| | | | | | | | L0750: 1, L0779: 1, | | |
| | | | | | | | L0752: 1, L0755: 1, | | |
| | | | | | | | L0599: 1 and H0667: 1. | | |
| | | 922194 | 458 | 3-503 | 1056 | Gly-25 to Arg-45, | | | |
| | | | | | | Asp-53 to Glu-60, | | | |
| | | | | | | Asp-66 to Lys-72, | | | |
| | | | | | | Arg-89 to Trp-106, | | | |
| | | | | | | Asn-121 to Gly-147, | | | |
| | | | | | | Val-152 to Gly-159, | | | |
| | | | | | | Ala-161 to Ser-166. | | | |
| 146 | HMCGL45 | 1165349 | 156 | 89-922 | 754 | Glu-8 to Pro-16, | AR061: 8, AR089: 5 | | |
| | | | | | | Gln-21 to Glu-26, | L0769: 5, L0774: 5, | | |
| | | | | | | Gly-105 to Arg-125, | L0756: 4, H0624: 2, | | |
| | | | | | | Asp-133 to Glu-140, | S0358: 2, S0444: 2, | | |
| | | | | | | Asp-146 to Lys-152, | S0408: 2, H0587: 2, | | |
| | | | | | | Pro-169 to Arg-176, | L0764: 2, L0766: 2, | | |
| | | | | | | Lys-203 to Lys-209, | L0775: 2, L0601: 2, | | |
| | | | | | | Asp-219 to Gly-224, | H0170: 1, S0442: 1, | | |
| | | | | | | Ala-254 to Tyr-264. | S0410: 1, H0497: 1, | | |
| | | | | | | | H0333: 1, H0632: 1, | | |
| | | | | | | | H0156: 1, L0022: 1, | | |
| | | | | | | | L0738: 1, H0271: 1, | | |
| | | | | | | | H0039: 1, S0344: 1, | | |
| | | | | | | | L0637: 1, L0772: 1, | | |
| | | | | | | | L0646: 1, L0773: 1, | | |
| | | | | | | | L0662: 1, L0518: 1, | | |
| | | | | | | | L0783: 1, L0791: 1, | | |
| | | | | | | | L0663: 1, S0374: 1, | | |
| | | | | | | | H0593: 1, H0660: 1, | | |
| | | | | | | | H0648: 1, H0672: 1, | | |
| | | | | | | | H0696: 1, L0749: 1, | | |
| | | | | | | | L0750: 1, L0779: 1, | | |
| | | | | | | | L0752: 1, L0755: 1, | | |
| | | | | | | | L0599: 1 and H0667: 1. | | |
| | | 922195 | 459 | 442-885 | 1057 | Gln-1 to Glu-10, | | | |
| | | | | | | Asp-16 to Lys-22, | | | |
| | | | | | | Pro-39 to Arg-46, | | | |
| | | | | | | Lys-73 to Lys-79, | | | |
| | | | | | | Asp-89 to Gly-94, | | | |
| | | | | | | Ala-124 to Tyr-134. | | | |
| 147 | HELEF11 | 1153884 | 157 | 1310-501 | 755 | Ser-29 to Val-36, | AR061: 1, AR089: 1 | | |
| | | | | | | Leu-217 to Ser-222, | S0045: 1 and H0457: 1. | | |
| | | | | | | Lys-255 to Ile-262. | | | |
| | | 926930 | 460 | 53-625 | 1058 | Phe-21 to Lys-27. | | | |
| 148 | HETJX04 | 1212235 | 158 | 3-704 | 756 | Asp-11 to Val-21, | AR089: 4, AR061: 2 | | |
| | | | | | | Pro-27 to Thr-43, | H0046: 1, H0032: 1, | | |
| | | | | | | Trp-92 to Lys-97, | H0040: 1 and L0565: 1. | | |
| | | | | | | Pro-136 to Gly-149, | | | |
| | | | | | | Met-182 to Val-193, | | | |
| | | | | | | Thr-197 to Asn-203. | | | |
| | | 927120 | 461 | 3-704 | 1059 | Asp-11 to Val-21, | | | |
| | | | | | | Pro-27 to Thr-43, | | | |
| | | | | | | Trp-92 to Lys-97, | | | |
| | | | | | | Pro-136 to Gly-149, | | | |
| | | | | | | Met-182 to Val-193, | | | |
| | | | | | | Thr-197 to Asn-203. | | | |
| 149 | HSOBC04 | 1165357 | 159 | 3-395 | 757 | Asn-61 to Glu-70, | AR061: 5, AR089: 2 | | |
| | | | | | | Ser-80 to Arg-85, | L0747: 14, H0551: 9, | | |
| | | | | | | Pro-88 to Ile-96, | H0617: 7, S0022: 6, | | |
| | | | | | | Gln-101 to Gly-109, | H0135: 6, S3014: 6, | | |
| | | | | | | Lys-117 to His-128. | L0750: 6, L0757: 6, | | |
| | | | | | | | L0759: 6, H0545: 5, | | |
| | | | | | | | S0126: 5, H0124: 4, | | |
| | | | | | | | H0529: 4, L0769: 4, | | |
| | | | | | | | L0764: 4, L0665: 4, | | |
| | | | | | | | H0547: 4, S3012: 4, | | |
| | | | | | | | L0740: 4, L0731: 4, | | |
| | | | | | | | H0624: 3, H0294: 3, | | |
| | | | | | | | L0717: 3, H0251: 3, | | |
| | | | | | | | H0024: 3, S0250: 3, | | |
| | | | | | | | H0100: 3, L0375: 3, | | |
| | | | | | | | L0651: 3, L0758: 3, | | |
| | | | | | | | H0170: 2, S0040: 2, | | |
| | | | | | | | H0583: 2, H0550: 2, | | |
| | | | | | | | H0333: 2, H0041: 2, | | |
| | | | | | | | H0012: 2, H0620: 2, | | |
| | | | | | | | H0284: 2, H0553: 2, | | |
| | | | | | | | H0606: 2, H0130: 2, | | |
| | | | | | | | L0641: 2, L0662: 2, | | |
| | | | | | | | L0650: 2, L0783: 2, | | |
| | | | | | | | L0666: 2, L0664: 2, | | |
| | | | | | | | L0744: 2, L0439: 2, | | |
| | | | | | | | L0751: 2, L0755: 2, | | |
| | | | | | | | H0667: 2, S0418: 1, | | |
| | | | | | | | S0354: 1, S0222: 1, | | |
| | | | | | | | H0441: 1, H0370: 1, | | |
| | | | | | | | T0109: 1, H0156: 1, | | |
| | | | | | | | H0318: 1, H0544: 1, | | |
| | | | | | | | H0546: 1, H0123: 1, | | |
| | | | | | | | L0471: 1, T0003: 1, | | |
| | | | | | | | H0014: 1, T0010: 1, | | |
| | | | | | | | H0266: 1, S0312: 1, | | |
| | | | | | | | H0428: 1, H0048: 1, | | |
| | | | | | | | H0413: 1, H0059: 1, | | |
| | | | | | | | H0560: 1, S0150: 1, | | |
| | | | | | | | H0633: 1, S0210: 1, | | |
| | | | | | | | L0770: 1, L0639: 1, | | |
| | | | | | | | L0772: 1, L0773: 1, | | |
| | | | | | | | L0768: 1, L0649: 1, | | |
| | | | | | | | L0775: 1, L0653: 1, | | |
| | | | | | | | L0776: 1, L0657: 1, | | |
| | | | | | | | L0656: 1, L0659: 1, | | |
| | | | | | | | L0526: 1, L0384: 1, | | |
| | | | | | | | L0809: 1, T0068: 1, | | |
| | | | | | | | H0593: 1, H0689: 1, | | |
| | | | | | | | H0435: 1, H0660: 1, | | |
| | | | | | | | S0330: 1, H0539: 1, | | |
| | | | | | | | S0152: 1, L0743: 1, | | |
| | | | | | | | L0777: 1, H0595: 1, | | |
| | | | | | | | L0591: 1, L0601: 1, | | |
| | | | | | | | S0192: 1, S0242: 1, | | |
| | | | | | | | S0194: 1, S0196: 1 and | | |
| | | | | | | | H0352: 1. | | |
| | | 927280 | 462 | 2-388 | 1060 | Asn-59 to Glu-67. | | | |
| 150 | HE8PW83 | 1069980 | 160 | 1-546 | 758 | Glu-69 to Gln-76. | AR089: 0, AR061: 0 | | |
| | | | | | | | L0748: 6, L0749: 6, | | |
| | | | | | | | L0803: 3, L0774: 3, | | |
| | | | | | | | L0775: 3, H0574: 1, | | |
| | | | | | | | H0632: 1, H0013: 1, | | |
| | | | | | | | L0789: 1, L0790: 1, | | |
| | | | | | | | H0144: 1 and L0581: 1. | | |
| | | 927532 | 463 | 1-546 | 1061 | Glu-69 to Gln-76. | | | |
| 151 | HWLEA48 | 927676 | 161 | 100-408 | 759 | Pro-1 toThr-8. | AR089: 1, AR061: 0 | | |
| | | | | | | | S0354: 1 and L0596: 1. | | |
| 152 | HNHNP81 | 1129143 | 162 | 143-514 | 760 | Ile-1 to Ser-16. | AR051: 23, AR054: | | |
| | | | | | | | 11, AR050: 9, AR061: | | |
| | | | | | | | 8, AR089: 5 | | |
| | | | | | | | S0216: 1 | | |
| | | 928378 | 464 | 143-514 | 1062 | Ile-1 to Ser-16. | | | |
| 153 | HFIDL68 | 1123641 | 163 | 1161-535 | 761 | Pro-18 to Pro-27, | AR089: 7, AR061: 4, | | |
| | | | | | | Glu-67 to Lys-73, | AR050: 2, AR054: 2, | | |
| | | | | | | Phe-147 to Tyr-165, | AR051: 1 | | |
| | | | | | | Thr-203 to Ser-209. | S0192: 1 | | |
| | | 928475 | 465 | 2-529 | 1063 | Glu-40 to Lys-46, | | | |
| | | | | | | Phe-120 to Ser-132. | | | |
| 154 | HUJCT05 | 1165261 | 164 | 2-1618 | 762 | Gly-1 to Glu-7, | AR089: 8, AR061: 4 | | |
| | | | | | | Lys-16 to Leu-21, | H0653: 2, H0650: 1, | | |
| | | | | | | Ser-26 to Val-31, | H0050: 1, L0370: 1, | | |
| | | | | | | Asp-64 to Thr-70, | L0800: 1, L0662: 1, | | |
| | | | | | | Asp-131 to Asn-136, | L0653: 1, H0436: 1 and | | |
| | | | | | | Lys-191 to Asp-197, | L0749: 1. | | |
| | | | | | | Ala-259 to Glu-264, | | | |
| | | | | | | Glu-273 to Gly-279, | | | |
| | | | | | | Gln-296 to Ala-305, | | | |
| | | | | | | Asn-317 to Ser-322, | | | |
| | | | | | | Asn-345 to Ser-352, | | | |
| | | | | | | Gln-384 to Asn-392, | | | |
| | | | | | | Asn-407 to Gly-412, | | | |
| | | | | | | Gly-434 to Pro-441, | | | |
| | | | | | | Lys-476 to Asp-481, | | | |
| | | | | | | Gln-497 to Asn-507, | | | |
| | | | | | | His-523 to Asn-528. | | | |
| | | 929264 | 466 | 2-520 | 1064 | Lys-10 to Leu-15, | | | |
| | | | | | | Ser-20 to Val-25, | | | |
| | | | | | | Asp-58 to Thr-64, | | | |
| | | | | | | Asp-125 to Asn-130. | | | |
| 155 | HTEGO05 | 932583 | 165 | 3-884 | 763 | Pro-12 to Tyr-21. | AR089: 1, AR061: 0 | | |
| | | | | | | | H0038: 2, L0745: 2 | | |
| | | | | | | | and H0616: 1. | | |
| 156 | HRDBH58 | 1226719 | 166 | 183-2591 | 764 | Asp-35 to Leu-41, | AR089: 1, AR061: 0 | | |
| | | | | | | Val-45 to Ser-57, | H0620: 3, L0794: 3, | | |
| | | | | | | Glu-134 to Asp-139, | S0212: 2, H0254: 2, | | |
| | | | | | | Pro-253 to Leu-259, | H0545: 2, H0266: 2, | | |
| | | | | | | Ser-301 to Gly-306, | L0639: 2, L0759: 2, | | |
| | | | | | | Leu-324 to Arg-330, | H0556: 1, H0657: 1, | | |
| | | | | | | Val-374 to Tyr-381, | S0418: 1, H0580: 1, | | |
| | | | | | | Gly-422 to Gly-427, | S0045: 1, H0619: 1, | | |
| | | | | | | Gly-466 to Gly-481, | H0550: 1, H0600: 1, | | |
| | | | | | | Lys-500 to Asp-505, | H0590: 1, H0253: 1, | | |
| | | | | | | Pro-540 to Asn-554, | H0581: 1, H0052: 1, | | |
| | | | | | | Arg-610 to Ala-616, | H0309: 1, H0085: 1, | | |
| | | | | | | Pro-773 to Ala-780. | H0083: 1, H0628: 1, | | |
| | | | | | | | H0617: 1, H0124: 1, | | |
| | | | | | | | H0059: 1, H0494: 1, | | |
| | | | | | | | S0144: 1, S0142: 1, | | |
| | | | | | | | S0426: 1, H0529: 1, | | |
| | | | | | | | L0796: 1, L0659: 1, | | |
| | | | | | | | L0790: 1, H0519: 1, | | |
| | | | | | | | H0711: 1, S0328: 1, | | |
| | | | | | | | H0521: 1, H0522: 1, | | |
| | | | | | | | S3014: 1, L0758: 1, | | |
| | | | | | | | S0260: 1, H0343: 1, | | |
| | | | | | | | S0434: 1, L0601: 1, | | |
| | | | | | | | H0668: 1 and H0542: 1. | | |
| | | 933364 | 467 | 455-2239 | 1065 | | | | |
| 157 | HSDGW22 | 934467 | 167 | 124-324 | 765 | Leu-49 toTyr-54. | AR061: 0, AR089: 0 | | |
| | | | | | | | L0794: 4, L0438: 4, | | |
| | | | | | | | L0761: 3, L0766: 3, | | |
| | | | | | | | L0748: 3, L0439: 3, | | |
| | | | | | | | H0556: 2, L0602: 2, | | |
| | | | | | | | L0754: 2, L0779: 2, | | |
| | | | | | | | H0580: 1, H0208: 1, | | |
| | | | | | | | H0013: 1, T0082: 1, | | |
| | | | | | | | S0010: 1, H0428: 1, | | |
| | | | | | | | H0553: 1, H0038: 1, | | |
| | | | | | | | H0616: 1, H0494: 1, | | |
| | | | | | | | L0796: 1, L0800: 1, | | |
| | | | | | | | L0773: 1, L0533: 1, | | |
| | | | | | | | L0803: 1, L0776: 1, | | |
| | | | | | | | L0657: 1, L0791: 1, | | |
| | | | | | | | H0520: 1, H0519: 1, | | |
| | | | | | | | H0521: 1, H0187: 1, | | |
| | | | | | | | L0731: 1, S0031: 1 and | | |
| | | | | | | | L0366: 1. | | |
| 158 | HNTMD79 | 1126594 | 168 | 1-663 | 766 | Thr-1 to Gly-11, | AR089: 2, AR061: 2 | | |
| | | | | | | Thr-26 to Gly-34. | H0519: 2, S0420: 1, | | |
| | | | | | | | T0114: 1, H0013: 1, | | |
| | | | | | | | S0346: 1, H0038: 1, | | |
| | | | | | | | S0142: 1, H0520: 1, | | |
| | | | | | | | H0521: 1 and H0136: 1. | | |
| | | 934522 | 468 | 182-586 | 1066 | | | | |
| 159 | HCE5J51 | 1197900 | 169 | 2-703 | 767 | Arg-20 to Ala-25, | AR061: 4, AR089: 2 | | |
| | | | | | | Asp-56 to Val-62, | H0052: 7, L0809: 4, | | |
| | | | | | | Gln-88 to Ala-93, | H0663: 3, L0439: 3, | | |
| | | | | | | Thr-126 to Ala-132, | L0752: 3, H0587: 2, | | |
| | | | | | | Gln-142 to Asn-160, | L0565: 2, H0550: 1, | | |
| | | | | | | Ser-189 to Asn-196. | H0194: 1, H0562: 1, | | |
| | | | | | | | H0571: 1, L0435: 1, | | |
| | | | | | | | L0769: 1, L0787: 1 and | | |
| | | | | | | | L0755: 1. | | |
| | | 934524 | 469 | 227-781 | 1067 | Pro-15 to Cys-22. | | | |
| 160 | HHEFQ42 | 1151482 | 170 | 3-947 | 768 | Val-57 to Tyr-65, | AR089: 8, AR061: 3 | | |
| | | | | | | Asp-73 to Lys-81, | L0803: 6, L0759: 6, | | |
| | | | | | | Arg-118 to Arg-123, | L0740: 4, S0410: 3, | | |
| | | | | | | Asp-140 to Leu-147, | L0764: 3, L0766: 3, | | |
| | | | | | | Pro-151 to Thr-156, | L0804: 3, H0144: 3, | | |
| | | | | | | Ala-163 to Glu-168, | S0406: 3, L0731: 3, | | |
| | | | | | | Pro-177 to Thr-187, | L0362: 3, S0358: 2, | | |
| | | | | | | Asp-220 to Thr-229, | S0444: 2, H0596: 2, | | |
| | | | | | | Thr-283 to Thr-289. | H0644: 2, H0124: 2, | | |
| | | | | | | | L0770: 2, L0663: 2, | | |
| | | | | | | | H0539: 2, L0747: 2, | | |
| | | | | | | | L0750: 2, L0779: 2, | | |
| | | | | | | | L0757: 2, L0758: 2, | | |
| | | | | | | | H0624: 1, H0171: 1, | | |
| | | | | | | | H0639: 1, L0717: 1, | | |
| | | | | | | | H0411: 1, S0222: 1, | | |
| | | | | | | | H0441: 1, H0431: 1, | | |
| | | | | | | | H0574: 1, H0013: 1, | | |
| | | | | | | | H0156: 1, H0085: 1, | | |
| | | | | | | | L0471: 1, T0023: 1, | | |
| | | | | | | | H0163: 1, H0130: 1, | | |
| | | | | | | | L0762: 1, L0763: 1, | | |
| | | | | | | | L0662: 1, L0794: 1, | | |
| | | | | | | | L0775: 1, L0375: 1, | | |
| | | | | | | | L0805: 1, L0659: 1, | | |
| | | | | | | | L0783: 1, L0666: 1, | | |
| | | | | | | | S0374: 1, H0520: 1, | | |
| | | | | | | | H0658: 1, H0672: 1, | | |
| | | | | | | | S0330: 1, L0743: 1, | | |
| | | | | | | | L0751: 1, L0777: 1 and | | |
| | | | | | | | H0542: 1. | | |
| | | 934527 | 470 | 29-1072 | 1068 | | | | |
| 161 | HLQDC55 | 1082368 | 171 | 2-499 | 769 | Gly-19 to Ile-27, | AR061: 9, AR089: 3 | | |
| | | | | | | Thr-31 to Asp-41, | H0574: 1 and S0344: 1. | | |
| | | | | | | Asp-58 to Phe-67, | | | |
| | | | | | | Ser-79 to Lys-85, | | | |
| | | | | | | Leu-119 to Glu-127. | | | |
| | | 934528 | 471 | 1-444 | 1069 | Gly-19 to Ile-27, | | | |
| | | | | | | Thr-31 to Asp-41, | | | |
| | | | | | | Asp-58 to Phe-67, | | | |
| | | | | | | Ser-79 to Lys-85, | | | |
| | | | | | | Leu-119 to Glu-127. | | | |
| 162 | HFPHI62 | 1195825 | 172 | 1-1119 | 770 | Ala-5 to Gly-13, | AR061: 226, AR089: | | |
| | | | | | | Pro-31 to Gln-37, | 79 | | |
| | | | | | | Ala-46 to Ala-69, | L0439: 8, H0052: 7, | | |
| | | | | | | Tyr-81 to Ser-87, | L0741: 7, L0756: 4, | | |
| | | | | | | Ser-120 to Ile-137, | S0010: 3, H0261: 2, | | |
| | | | | | | Thr-148 to Thr-156, | H0156: 2, S0049: 2, | | |
| | | | | | | Lys-181 to Phe-191, | L0770: 2, L0776: 2, | | |
| | | | | | | Pro-275 to Asn-297, | L0742: 2, L0745: 2, | | |
| | | | | | | Asp-322 to Gly-331, | L0366: 2, S0222: 1, | | |
| | | | | | | Lys-352 to Glu-359, | H0438: 1, H0390: 1, | | |
| | | | | | | Gln-365 to Ser-372. | S0346: 1, H0009: 1, | | |
| | | | | | | | L0455: 1, S0038: 1, | | |
| | | | | | | | L0789: 1 and L0758: 1. | | |
| | | 934529 | 472 | 3-410 | 1070 | Met-1 to Gln-6, | | | |
| | | | | | | Pro-38 to Asn-60. | | | |
| 163 | HE8QH09 | 1152238 | 173 | 1-597 | 771 | Ala-46 to Ser-53, | AR089: 3, AR061: 3 | | |
| | | | | | | Pro-63 to Leu-78, | H0261: 1, H0013: 1, | | |
| | | | | | | Asp-106 to Asp-114, | H0052: 1, H0009: 1, | | |
| | | | | | | Glu-129 to Leu-136, | H0144: 1 and L0438: 1. | | |
| | | | | | | Gly-144 to Asp-149. | | | |
| | | 934532 | 473 | 2-625 | 1071 | Gly-4 to Thr-9. | | | |
| 164 | HFAAX29 | 1128791 | 174 | 1-585 | 772 | Ala-108 to His-113, | AR089: 12, AR061: 4 | | |
| | | | | | | Asp-149 to Asn-154, | H0242: 2, S0040: 1, | | |
| | | | | | | Cys-179 to Val-186. | S6024: 1, S6014: 1, | | |
| | | | | | | | H0586: 1, H0013: 1, | | |
| | | | | | | | H0124: 1, L0756: 1, | | |
| | | | | | | | L0592: 1, L0366: 1 and | | |
| | | | | | | | H0542: 1. | | |
| | | 934540 | 474 | 2-565 | 1072 | | | | |
| 165 | HHFOC79 | 1182276 | 175 | 157-681 | 773 | Ala-1 to Trp-9, | AR051: 14, AR089: 6, | | |
| | | | | | | Pro-12 to Gln-17, | AR061: 4, AR050: 2, | | |
| | | | | | | Arg-37 to Pro-42, | AR054: 2 | | |
| | | | | | | Thr-44 to Lys-51, | L0744: 9, L0747: 8, | | |
| | | | | | | Pro-66 to Pro-80, | S3014: 7, L0740: 7, | | |
| | | | | | | Thr-97 to Ala-106, | S0192: 6, S0027: 5, | | |
| | | | | | | Pro-120 to Trp-128, | S0212: 4, H0124: 4, | | |
| | | | | | | Leu-131 to Gly-137. | L0731: 4, L0662: 3, | | |
| | | | | | | | L0743: 3, L0752: 3, | | |
| | | | | | | | L0759: 3, H0662: 2, | | |
| | | | | | | | S0418: 2, S0046: 2, | | |
| | | | | | | | H0575: 2, H0545: 2, | | |
| | | | | | | | H0041: 2, H0413: 2, | | |
| | | | | | | | L0775: 2, H0696: 2, | | |
| | | | | | | | S0037: 2, L0748: 2, | | |
| | | | | | | | L0751: 2, L0754: 2, | | |
| | | | | | | | L0749: 2, L0758: 2, | | |
| | | | | | | | H0445: 2, S0276: 2, | | |
| | | | | | | | H0624: 1, L0778: 1, | | |
| | | | | | | | L0005: 1, H0645: 1, | | |
| | | | | | | | H0441: 1, H0391: 1, | | |
| | | | | | | | S0005: 1, T0040: 1, | | |
| | | | | | | | H0069: 1, H0427: 1, | | |
| | | | | | | | S0280: 1, H0042: 1, | | |
| | | | | | | | T0048: 1, H0505: 1, | | |
| | | | | | | | H0309: 1, H0544: 1, | | |
| | | | | | | | H0009: 1, H0266: 1, | | |
| | | | | | | | H0617: 1, H0412: 1, | | |
| | | | | | | | H0623: 1, T0004: 1, | | |
| | | | | | | | L0564: 1, T0041: 1, | | |
| | | | | | | | H0494: 1, H0633: 1, | | |
| | | | | | | | H0646: 1, H0652: 1, | | |
| | | | | | | | L0769: 1, L0646: 1, | | |
| | | | | | | | L0655: 1, L0659: 1, | | |
| | | | | | | | L0546: 1, L0783: 1, | | |
| | | | | | | | L0809: 1, H0144: 1, | | |
| | | | | | | | L0565: 1, S0126: 1, | | |
| | | | | | | | H0689: 1, H0435: 1, | | |
| | | | | | | | H0659: 1, H0672: 1, | | |
| | | | | | | | S0378: 1, H0555: 1, | | |
| | | | | | | | S0206: 1, L0777: 1, | | |
| | | | | | | | L0780: 1, S0434: 1, | | |
| | | | | | | | S0011: 1, S0194: 1 and | | |
| | | | | | | | H0506: 1. | | |
| | | 935406 | 475 | 3-443 | 1073 | Glu-6 to Glu-15, | | | |
| | | | | | | Thr-21 to Asp-28, | | | |
| | | | | | | Ser-42 to Lys-47. | | | |
| 166 | HOGEQ43 | 1223485 | 176 | 1-2970 | 774 | Gly-1 to Trp-10, | AR089: 1, AR061: 0 | | |
| | | | | | | Glu-12 to Thr-48, | H0457: 8, L0766: 7, | | |
| | | | | | | Phe-94 to Gly-99, | L0599: 6, H0677: 6, | | |
| | | | | | | Tyr-105 to Ser-119, | L0438: 5, L0779: 5, | | |
| | | | | | | Thr-136 to Ala-147, | H0012: 3, L0809: 3, | | |
| | | | | | | Ser-165 to Ala-171, | H0656: 2, H0620: 2, | | |
| | | | | | | Glu-222 to Trp-227, | L0771: 2, H0435: 2, | | |
| | | | | | | His-233 to Trp-238, | H0436: 2, L0748: 2, | | |
| | | | | | | Glu-251 to Glu-258, | L0439: 2, L0751: 2, | | |
| | | | | | | Asn-265 to Ser-270, | L0749: 2, S0134: 1, | | |
| | | | | | | Gln-305 to Trp-310, | H0645: 1, H0587: 1, | | |
| | | | | | | Asn-325 to Phe-335, | H0635: 1, H0581: 1, | | |
| | | | | | | Ser-341 to Glu-349, | H0546: 1, H0477: 1, | | |
| | | | | | | Lys-378 to Trp-383, | H0560: 1, H0641: 1, | | |
| | | | | | | Ala-390 to Gly-398, | S0422: 1, H0529: 1, | | |
| | | | | | | Asn-451 to Trp-458, | L0521: 1, L0662: 1, | | |
| | | | | | | Met-476 to Trp-486, | L0794: 1, L0774: 1, | | |
| | | | | | | Gln-497 to Gly-505, | L0775: 1, L0606: 1, | | |
| | | | | | | Arg-567 to Glu-573, | L0659: 1, L0647: 1, | | |
| | | | | | | Gln-610 to Phe-618, | L0789: 1, L0791: 1, | | |
| | | | | | | Glu-687 to Arg-697, | L0792: 1, L0666: 1, | | |
| | | | | | | Gly-732 to Glu-742, | L0663: 1, L0665: 1, | | |
| | | | | | | Thr-797 to Asp-802, | H0702: 1, H0547: 1, | | |
| | | | | | | Arg-818 to Thr-827, | H0576: 1, S0028: 1, | | |
| | | | | | | Ile-840 to Lys-849, | L0756: 1, L0777: 1, | | |
| | | | | | | Ala-853 to Gly-860, | L0755: 1, L0758: 1, | | |
| | | | | | | Pro-879 to Tyr-886, | H0543: 1 and H0506: 1. | | |
| | | | | | | Ser-893 to Ile-901, | | | |
| | | | | | | Thr-904 to Phe-911, | | | |
| | | | | | | Asp-931 to Pro-937, | | | |
| | | | | | | Arg-952 to Thr-962. | | | |
| | | 935465 | 476 | 1-150 | 1074 | Glu-1 to Thr-13. | | | |
| 167 | HCECQ23 | 938398 | 177 | 810-289 | 775 | Pro-26 to Tyr-31. | AR089: 1, AR061: 0 | | |
| | | | | | | | L0769: 3, H0052: 2, | | |
| | | | | | | | L0439: 2, H0572: 1, | | |
| | | | | | | | H0015: 1, L0438: 1 and | | |
| | | | | | | | L0741: 1. | | |
| 168 | HTGAU79 | 1178621 | 178 | 52-966 | 776 | His-12 to Arg-20, | AR061: 7, AR089: 4 | | |
| | | | | | | Pro-26 to Asp-43, | H0551: 3, H0529: 3, | | |
| | | | | | | Ala-62 to Glu-70, | L0769: 3, L0758: 3, | | |
| | | | | | | Arg-78 to Arg-83, | S0418: 2, L0770: 2, | | |
| | | | | | | Phe-100 to Gln-105, | L0773: 2, L0521: 2, | | |
| | | | | | | Gly-129 to Glu-136, | H0701: 2, S0126: 2, | | |
| | | | | | | Met-182 to Ile-187, | L0747: 2, L0731: 2, | | |
| | | | | | | Tyr-277 to Ala-284. | L0759: 2, L0589: 2, | | |
| | | | | | | | L0601: 2, H0624: 1, | | |
| | | | | | | | H0149: 1, H0556: 1, | | |
| | | | | | | | H0295: 1, S0134: 1, | | |
| | | | | | | | H0583: 1, H0661: 1, | | |
| | | | | | | | H0592: 1, H0013: 1, | | |
| | | | | | | | H0635: 1, H0581: 1, | | |
| | | | | | | | S0250: 1, H0212: 1, | | |
| | | | | | | | H0412: 1, S0144: 1, | | |
| | | | | | | | L0763: 1, L0645: 1, | | |
| | | | | | | | L0764: 1, L0794: 1, | | |
| | | | | | | | L0766: 1, L0775: 1, | | |
| | | | | | | | L0783: 1, L0665: 1, | | |
| | | | | | | | H0519: 1, H0435: 1, | | |
| | | | | | | | H0672: 1, H0436: 1, | | |
| | | | | | | | S3014: 1, S0028: 1, | | |
| | | | | | | | L0750: 1, L0777: 1, | | |
| | | | | | | | L0366: 1, H0667: 1 and | | |
| | | | | | | | H0423: 1. | | |
| | | 940369 | 477 | 63-977 | 1075 | His-12 to Arg-20, | | | |
| | | | | | | Pro-26 to Asp-43, | | | |
| | | | | | | Ala-62 to Glu-70, | | | |
| | | | | | | Arg-78 to Arg-83, | | | |
| | | | | | | Phe-100 to Gln-105, | | | |
| | | | | | | Gly-129 to Glu-136. | | | |
| 169 | HE9FI33 | 1156432 | 179 | 2-286 | 777 | Glu-65 to Pro-70. | AR061: 6, AR089: 2 | | |
| | | | | | | | L0749: 2, H0144: 1 | | |
| | | | | | | | and L0748: 1. | | |
| | | 941348 | 478 | 3-434 | 1076 | | | | |
| 170 | HNHCP79 | 565781 | 180 | 23-301 | 778 | Gly-16 to Asn-21. | AR051: 9, AR054: 9, | | |
| | | | | | | | AR050: 7, AR061: 3, | | |
| | | | | | | | AR089: 2 | | |
| | | | | | | | H0271: 26, H0521: 26, | | |
| | | | | | | | H0046: 20, L0747: 20, | | |
| | | | | | | | S0278: 14, S0052: 14, | | |
| | | | | | | | L0754: 12, L0599: 12, | | |
| | | | | | | | S0142: 11, S0428: 11, | | |
| | | | | | | | H0179: 10, S0344: 10, | | |
| | | | | | | | L0776: 9, H0638: 8, | | |
| | | | | | | | L0771: 8, L0666: 8, | | |
| | | | | | | | S0360: 7, S0144: 7, | | |
| | | | | | | | L0775: 7, L0659: 7, | | |
| | | | | | | | H0422: 7, S0354: 6, | | |
| | | | | | | | H0580: 6, H0622: 6, | | |
| | | | | | | | H0641: 6, H0522: 6, | | |
| | | | | | | | L0740: 6, L0595: 6, | | |
| | | | | | | | H0581: 5, H0416: 5, | | |
| | | | | | | | H0673: 5, L0598: 5, | | |
| | | | | | | | L0774: 5, S3014: 5, | | |
| | | | | | | | L0777: 5, L0759: 5, | | |
| | | | | | | | L0362: 5, H0423: 5, | | |
| | | | | | | | H0069: 4, H0674: 4, | | |
| | | | | | | | L0770: 4, L0769: 4, | | |
| | | | | | | | L0750: 4, L0752: 4, | | |
| | | | | | | | L0731: 4, L0757: 4, | | |
| | | | | | | | L0603: 4, S0114: 3, | | |
| | | | | | | | S0134: 3, S0116: 3, | | |
| | | | | | | | H0341: 3, S0418: 3, | | |
| | | | | | | | S0358: 3, H0545: 3, | | |
| | | | | | | | H0050: 3, H0646: 3, | | |
| | | | | | | | L0768: 3, L0664: 3, | | |
| | | | | | | | S0053: 3, S0216: 3, | | |
| | | | | | | | S0374: 3, S0404: 3, | | |
| | | | | | | | S0206: 3, L0745: 3, | | |
| | | | | | | | L0756: 3, L0581: 3, | | |
| | | | | | | | H0170: 2, H0222: 2, | | |
| | | | | | | | L0785: 2, H0663: 2, | | |
| | | | | | | | S0376: 2, S0132: 2, | | |
| | | | | | | | S0222: 2, H0370: 2, | | |
| | | | | | | | H0486: 2, H0013: 2, | | |
| | | | | | | | H0635: 2, S0280: 2, | | |
| | | | | | | | H0575: 2, H0036: 2, | | |
| | | | | | | | H0618: 2, H0597: 2, | | |
| | | | | | | | H0014: 2, H0039: 2, | | |
| | | | | | | | L0142: 2, H0551: 2, | | |
| | | | | | | | H0056: 2, H0561: 2, | | |
| | | | | | | | S0426: 2, L0763: 2, | | |
| | | | | | | | L0761: 2, L0648: 2, | | |
| | | | | | | | L0662: 2, L0767: 2, | | |
| | | | | | | | L0655: 2, L0519: 2, | | |
| | | | | | | | L0665: 2, H0519: 2, | | |
| | | | | | | | H0435: 2, H0696: 2, | | |
| | | | | | | | S0027: 2, L0743: 2, | | |
| | | | | | | | L0751: 2, S0031: 2, | | |
| | | | | | | | S0260: 2, H0445: 2, | | |
| | | | | | | | S0434: 2, L0590: 2, | | |
| | | | | | | | S0276: 2, H0395: 1, | | |
| | | | | | | | H0556: 1, T0002: 1, | | |
| | | | | | | | H0685: 1, S0040: 1, | | |
| | | | | | | | H0294: 1, S0218: 1, | | |
| | | | | | | | S0001: 1, H0484: 1, | | |
| | | | | | | | H0483: 1, H0662: 1, | | |
| | | | | | | | H0176: 1, H0589: 1, | | |
| | | | | | | | H0459: 1, S0356: 1, | | |
| | | | | | | | S0408: 1, S0410: 1, | | |
| | | | | | | | L0717: 1, H0411: 1, | | |
| | | | | | | | H0549: 1, H0550: 1, | | |
| | | | | | | | H0431: 1, H0608: 1, | | |
| | | | | | | | H0409: 1, H0404: 1, | | |
| | | | | | | | H0587: 1, H0485: 1, | | |
| | | | | | | | H0250: 1, L0021: 1, | | |
| | | | | | | | H0590: 1, H0318: 1, | | |
| | | | | | | | T0071: 1, H0421: 1, | | |
| | | | | | | | H0263: 1, H0596: 1, | | |
| | | | | | | | H0150: 1, H0009: 1, | | |
| | | | | | | | L0471: 1, H0011: 1, | | |
| | | | | | | | S0051: 1, H0083: 1, | | |
| | | | | | | | H0510: 1, H0594: 1, | | |
| | | | | | | | S0318: 1, H0687: 1, | | |
| | | | | | | | H0286: 1, S0250: 1, | | |
| | | | | | | | H0328: 1, H0553: 1, | | |
| | | | | | | | L0055: 1, H0032: 1, | | |
| | | | | | | | H0169: 1, H0316: 1, | | |
| | | | | | | | H0135: 1, H0090: 1, | | |
| | | | | | | | H0591: 1, H0634: 1, | | |
| | | | | | | | H0413: 1, H0623: 1, | | |
| | | | | | | | H0059: 1, T0069: 1, | | |
| | | | | | | | S0038: 1, H0100: 1, | | |
| | | | | | | | T0041: 1, H0509: 1, | | |
| | | | | | | | S0150: 1, H0633: 1, | | |
| | | | | | | | S0002: 1, H0529: 1, | | |
| | | | | | | | L0762: 1, L0667: 1, | | |
| | | | | | | | L0772: 1, L0646: 1, | | |
| | | | | | | | L0643: 1, L0521: 1, | | |
| | | | | | | | L0766: 1, L0389: 1, | | |
| | | | | | | | L0653: 1, L0629: 1, | | |
| | | | | | | | L0527: 1, L0657: 1, | | |
| | | | | | | | L0517: 1, L0384: 1, | | |
| | | | | | | | L0809: 1, L0663: 1, | | |
| | | | | | | | H0144: 1, H0697: 1, | | |
| | | | | | | | S0126: 1, H0690: 1, | | |
| | | | | | | | H0670: 1, H0648: 1, | | |
| | | | | | | | S0378: 1, S0380: 1, | | |
| | | | | | | | H0518: 1, S0152: 1, | | |
| | | | | | | | S0013: 1, S0044: 1, | | |
| | | | | | | | H0214: 1, H0555: 1, | | |
| | | | | | | | H0436: 1, H0478: 1, | | |
| | | | | | | | S0432: 1, S3012: 1, | | |
| | | | | | | | S0032: 1, L0744: 1, | | |
| | | | | | | | L0439: 1, L0779: 1, | | |
| | | | | | | | L0758: 1, S0308: 1, | | |
| | | | | | | | S0436: 1, L0591: 1, | | |
| | | | | | | | L0593: 1, S0011: 1, | | |
| | | | | | | | H0543: 1 and S0458: 1. | | |
| | | 775293 | 479 | 138-275 | 1077 | | | | |
| | | 941862 | 480 | 2-748 | 1078 | | | | |
| 171 | HTLIY52 | 1194806 | 181 | 164-1351 | 779 | Pro-3 to Gly-8, | AR061: 0, AR089: 0 | | |
| | | | | | | Val-21 to Gly-30, | H0618: 64, H0253: 52, | | |
| | | | | | | Gly-68 to Ala-85, | L0758: 6, L0779: 2, | | |
| | | | | | | His-94 to Gly-99, | H0392: 1, H0038: 1, | | |
| | | | | | | Ala-105 to Arg-110, | L0761: 1, L0803: 1, | | |
| | | | | | | Ala-114 to Gln-138, | L0806: 1 and L0697: 1. | | |
| | | | | | | Arg-143 to Glu-155, | | | |
| | | | | | | Leu-202 to Arg-222, | | | |
| | | | | | | Arg-287 to Ser-292, | | | |
| | | | | | | Pro-325 to Arg-332, | | | |
| | | | | | | Arg-337 to Gly-351, | | | |
| | | | | | | Val-388 to Lys-396. | | | |
| | | 942161 | 481 | 1-1368 | 1079 | | | | |
| 172 | HRAED74 | 942527 | 182 | 289-651 | 780 | His-9 to Ile-15. | AR061: 1, AR089: 1 | | |
| | | | | | | | S0222: 3, H0052: 3, | | |
| | | | | | | | L0361: 3, H0179: 2, | | |
| | | | | | | | L0769: 2, H0521: 2, | | |
| | | | | | | | H0555: 2, L0779: 2, | | |
| | | | | | | | L0758: 2, H0663: 1, | | |
| | | | | | | | H0549: 1, S0220: 1, | | |
| | | | | | | | H0586: 1, H0156: 1, | | |
| | | | | | | | S0010: 1, H0596: 1, | | |
| | | | | | | | S0051: 1, T0010: 1, | | |
| | | | | | | | H0271: 1, L0143: 1, | | |
| | | | | | | | H0617: 1, H0652: 1, | | |
| | | | | | | | L0764: 1, L0794: 1, | | |
| | | | | | | | L0806: 1, L0809: 1, | | |
| | | | | | | | H0518: 1, H0478: 1, | | |
| | | | | | | | L0751: 1, L0747: 1, | | |
| | | | | | | | L0750: 1, L0780: 1, | | |
| | | | | | | | L0731: 1 and L0366: 1. | | |
| 173 | HFKKN77 | 943757 | 183 | 145-684 | 781 | Thr-9 to Val-16. | AR061: 6, AR089: 2 | | |
| | | | | | | | H0620: 2, H0024: 2, | | |
| | | | | | | | H0208: 1, S0222: 1, | | |
| | | | | | | | H0194: 1, H0123: 1, | | |
| | | | | | | | H0051: 1 and S0052: 1. | | |
| 174 | HTEMU66 | 1205381 | 184 | 462-962 | 782 | His-3 to Ser-14, | AR061: 7, AR089: 5 | | |
| | | | | | | Thr-20 to Ser-27, | H0616: 1 | | |
| | | | | | | Pro-41 to Asn-50, | | | |
| | | | | | | Glu-101 to Asp-109, | | | |
| | | | | | | Leu-149 to Ser-154. | | | |
| | | 944419 | 482 | 454-963 | 1080 | Ala-1 to Gln-7, | | | |
| | | | | | | Lys-24 to Ser-30, | | | |
| | | | | | | Pro-44 to Asn-53, | | | |
| | | | | | | Glu-104 to Asp-112, | | | |
| | | | | | | Leu-152 to Ser-157. | | | |
| 175 | HWAGU62 | 1206797 | 185 | 210-1511 | 783 | Thr-1 to Leu-9, | AR061: 5, AR089: 5 | | |
| | | | | | | Pro-34 to Lys-40, | S0356: 9, L0803: 3, | | |
| | | | | | | Glu-82 to Gln-87, | L0766: 2, L0743: 2, | | |
| | | | | | | Ala-216 to His-233, | L0731: 2, L0785: 1, | | |
| | | | | | | Met-235 to His-243, | S0116: 1, S0354: 1, | | |
| | | | | | | Pro-322 to Lys-327, | S0358: 1, S0278: 1, | | |
| | | | | | | Arg-346 to Trp-351. | H0642: 1, H0486: 1, | | |
| | | | | | | | H0581: 1, H0596: 1, | | |
| | | | | | | | H0355: 1, S0003: 1, | | |
| | | | | | | | L0455: 1, H0090: 1, | | |
| | | | | | | | H0591: 1, S0142: 1, | | |
| | | | | | | | S0344: 1, S0422: 1, | | |
| | | | | | | | S0426: 1, L0598: 1, | | |
| | | | | | | | L0794: 1, L0804: 1, | | |
| | | | | | | | L0659: 1, L0789: 1, | | |
| | | | | | | | L0664: 1, H0547: 1, | | |
| | | | | | | | H0660: 1, S0330: 1, | | |
| | | | | | | | L0754: 1, L0779: 1, | | |
| | | | | | | | L0758: 1, L0608: 1, | | |
| | | | | | | | S0026: 1 and H0543: 1. | | |
| | | 945368 | 483 | 1-1500 | 1081 | Pro-100 to Lys-106, | | | |
| | | | | | | Glu-148 to Gln-153. | | | |
| 176 | HFPFB39 | 1198036 | 186 | 93-1643 | 784 | Glu-62 to Tyr-67, | AR061: 6, AR089: 3 | | |
| | | | | | | Pro-169 to Lys-179, | S0010: 4, S0222: 3, | | |
| | | | | | | Pro-189 to Ala-201, | H0455: 2, L0803: 2, | | |
| | | | | | | Ala-218 to Arg-223, | L0439: 2, L0745: 2, | | |
| | | | | | | Tyr-324 to Asn-331, | S0282: 1, S0400: 1, | | |
| | | | | | | Gly-352 to Val-357, | H0456: 1, H0441: 1, | | |
| | | | | | | Leu-365 to Lys-371, | S0346: 1, H0509: 1, | | |
| | | | | | | His-393 to Ala-399, | L0769: 1, L0438: 1, | | |
| | | | | | | Asp-420 to Asn-425, | L0756: 1 and S0106: 1. | | |
| | | | | | | Thr-460 to Lys-473, | | | |
| | | | | | | Ser-488 to Gly-502. | | | |
| | | 946170 | 484 | 1613-462 | 1082 | Pro-36 to Lys-46, | | | |
| | | | | | | Pro-56 to Ala-68, | | | |
| | | | | | | Ala-85 to Arg-90, | | | |
| | | | | | | Tyr-191 to Asn-198, | | | |
| | | | | | | Gly-219 to Val-224, | | | |
| | | | | | | Leu-232 to Lys-238, | | | |
| | | | | | | His-260 to Ala-266. | | | |
| 177 | HPMFI38 | 1165993 | 187 | 3-410 | 785 | Pro-128 to Ser-134. | AR061: 3, AR089: 2 | | |
| | | | | | | | L0754: 3, H0644: 2, | | |
| | | | | | | | L0803: 2, L0748: 2, | | |
| | | | | | | | H0620: 1, H0031: 1, | | |
| | | | | | | | L0774: 1 and L0789: 1. | | |
| | | 946252 | 485 | 992-495 | 1083 | Leu-143 to Thr-149, | | | |
| | | | | | | Gln-152 to Glu-157. | | | |
| 178 | HBXDJ07 | 946830 | 188 | 125-652 | 786 | Glu-62 to Lys-68, | AR061: 2, AR089: 2 | | |
| | | | | | | Asn-105 to Gly-113. | L0439: 11, L0794: 5, | | |
| | | | | | | | L0666: 5, S0222: 4, | | |
| | | | | | | | H0052: 3, L0756: 3, | | |
| | | | | | | | H0624: 2, S6028: 2, | | |
| | | | | | | | S0038: 2, L0638: 2, | | |
| | | | | | | | L0805: 2, L0664: 2, | | |
| | | | | | | | L0438: 2, L0740: 2, | | |
| | | | | | | | H0171: 1, S6024: 1, | | |
| | | | | | | | H0013: 1, H0374: 1, | | |
| | | | | | | | H0050: 1, S0050: 1, | | |
| | | | | | | | H0051: 1, S0386: 1, | | |
| | | | | | | | L0769: 1, L0768: 1, | | |
| | | | | | | | L0776: 1, L0659: 1, | | |
| | | | | | | | L0789: 1, H0144: 1, | | |
| | | | | | | | L0745: 1 and L0746: 1. | | |
| 179 | HOFMS43 | 1152417 | 189 | 1-1029 | 787 | Pro-1 to Asp-16, | AR051: 15, AR050: 9, | | |
| | | | | | | Pro-60 to Asn-65, | AR089: 7, AR061: 5, | | |
| | | | | | | Tyr-83 to Tyr-89, | AR054: 1 | | |
| | | | | | | Ser-102 to Pro-115, | H0415: 1 | | |
| | | | | | | Pro-130 to Glu-141, | | | |
| | | | | | | Ser-151 to Glu-160, | | | |
| | | | | | | Trp-177 to Glu-183, | | | |
| | | | | | | Phe-191 to Arg-198, | | | |
| | | | | | | Phe-203 to Tyr-209, | | | |
| | | | | | | Asn-234 to Ala-240, | | | |
| | | | | | | Pro-266 to Pro-271, | | | |
| | | | | | | Ser-276 to Thr-311, | | | |
| | | | | | | Arg-338 to Gly-343. | | | |
| | | 947973 | 486 | 3-359 | 1084 | Asp-1 to Asp-17, | | | |
| | | | | | | Pro-61 to Asn-66, | | | |
| | | | | | | Tyr-84 to Tyr-90, | | | |
| | | | | | | Ser-103 to Trp-110. | | | |
| 180 | HOVCO14 | 1091087 | 190 | 3-563 | 788 | Arg-78 to His-85, | AR089: 3, AR061: 2 | | |
| | | | | | | Leu-99 to Lys-104, | S6016: 1 and H0428: 1. | | |
| | | | | | | Lys-123 to His-132, | | | |
| | | | | | | Thr-164 to Pro-171. | | | |
| | | 947999 | 487 | 3-539 | 1085 | Arg-78 to His-85, | | | |
| | | | | | | Leu-99 to Lys-104, | | | |
| | | | | | | Lys-123 to His-132, | | | |
| | | | | | | Ser-157 to Pro-174. | | | |
| 181 | HTEPE35 | 1105272 | 191 | 1-762 | 789 | Tyr-1 to Lys-8, | AR061: 4, AR089: 1 | | |
| | | | | | | Phe-19 to Ser-24, | L0758: 7, L0768: 2, | | |
| | | | | | | Thr-28 to Ser-34, | H0616: 1 and L0151: 1. | | |
| | | | | | | Pro-54 to Trp-70, | | | |
| | | | | | | Leu-110 to Asn-118, | | | |
| | | | | | | Ser-145 to Asp-151, | | | |
| | | | | | | Pro-162 to Val-172, | | | |
| | | | | | | Pro-180 to Thr-185. | | | |
| | | 948475 | 488 | 839-78 | 1086 | Tyr-1 to Lys-8, | | | |
| | | | | | | Phe-19 to Ser-24, | | | |
| | | | | | | Thr-28 to Ser-34, | | | |
| | | | | | | Pro-54 to Trp-70. | | | |
| 182 | HE8UA52 | 1229490 | 192 | 1-1728 | 790 | Pro-22 to Gly-32, | AR061: 6, AR089: 1 | | |
| | | | | | | Arg-52 to Gly-60, | L0752: 5, H0013: 2, | | |
| | | | | | | Ser-78 to Met-89, | L0780: 2, H0624: 1, | | |
| | | | | | | Ile-100 to Ser-106, | H0170: 1, H0645: 1, | | |
| | | | | | | Asp-130 to Leu-137, | H0318: 1, L0750: 1, | | |
| | | | | | | Tyr-146 to Ala-151. | L0779: 1 and L0777: 1. | | |
| | | 948509 | 489 | 1-615 | 1087 | Pro-22 to Gly-32, | | | |
| | | | | | | Arg-52 to Gly-60, | | | |
| | | | | | | Ser-78 to Met-89, | | | |
| | | | | | | Ile-100 to Ser-106, | | | |
| | | | | | | Asp-130 to Leu-137, | | | |
| | | | | | | Tyr-146 to Ser-152. | | | |
| 183 | HOUBE50 | 1090776 | 193 | 1-1188 | 791 | Ser-50 to Glu-62. | AR061: 1, AR089: 0 | | |
| | | | | | | | S0040: 1, S0222: 1, | | |
| | | | | | | | L0471: 1 and L0517: 1. | | |
| | | 948519 | 490 | 1-243 | 1088 | Ser-50 to Ser-66. | | | |
| 184 | HAJAV28 | 1165229 | 194 | 3-1073 | 792 | Pro-1 to Ala-12, | AR089: 3, AR061: 1 | | |
| | | | | | | Ile-264 to Val-277, | L0747: 12, L0755: 12, | | |
| | | | | | | Gln-304 to Gln-309, | L0766: 9, L0438: 9, | | |
| | | | | | | Ile-324 to Leu-330. | L0754: 7, H0046: 6, | | |
| | | | | | | | L0751: 6, L0752: 6, | | |
| | | | | | | | H0068: 5, L0775: 5, | | |
| | | | | | | | L0439: 5, S0010: 4, | | |
| | | | | | | | H0547: 4, S0152: 4, | | |
| | | | | | | | L0740: 4, L0779: 4, | | |
| | | | | | | | L0759: 4, H0591: 3, | | |
| | | | | | | | L0771: 3, L0662: 3, | | |
| | | | | | | | L0774: 3, L0666: 3, | | |
| | | | | | | | S0028: 3, L0748: 3, | | |
| | | | | | | | L0756: 3, L0731: 3, | | |
| | | | | | | | L0757: 3, H0624: 2, | | |
| | | | | | | | S0045: 2, H0619: 2, | | |
| | | | | | | | S0222: 2, S0049: 2, | | |
| | | | | | | | H0052: 2, H0615: 2, | | |
| | | | | | | | S0036: 2, T0041: 2, | | |
| | | | | | | | H0509: 2, S0002: 2, | | |
| | | | | | | | S0426: 2, L0769: 2, | | |
| | | | | | | | L0776: 2, L0659: 2, | | |
| | | | | | | | H0521: 2, H0707: 2, | | |
| | | | | | | | L0594: 2, L0362: 2, | | |
| | | | | | | | S0011: 2, H0170: 1, | | |
| | | | | | | | H0171: 1, H0685: 1, | | |
| | | | | | | | S0040: 1, T0049: 1, | | |
| | | | | | | | H0657: 1, S0001: 1, | | |
| | | | | | | | H0638: 1, S0358: 1, | | |
| | | | | | | | S0360: 1, S0408: 1, | | |
| | | | | | | | H0637: 1, S0007: 1, | | |
| | | | | | | | S0132: 1, S6022: 1, | | |
| | | | | | | | H0550: 1, H0431: 1, | | |
| | | | | | | | H0455: 1, H0574: 1, | | |
| | | | | | | | H0486: 1, T0114: 1, | | |
| | | | | | | | H0250: 1, H0069: 1, | | |
| | | | | | | | H0156: 1, L0105: 1, | | |
| | | | | | | | H0597: 1, H0546: 1, | | |
| | | | | | | | H0545: 1, H0050: 1, | | |
| | | | | | | | L0163: 1, H0594: 1, | | |
| | | | | | | | H0266: 1, H0290: 1, | | |
| | | | | | | | S0214: 1, H0328: 1, | | |
| | | | | | | | H0688: 1, H0622: 1, | | |
| | | | | | | | H0032: 1, H0673: 1, | | |
| | | | | | | | H0674: 1, S0364: 1, | | |
| | | | | | | | H0090: 1, H0040: 1, | | |
| | | | | | | | H0551: 1, T0067: 1, | | |
| | | | | | | | H0268: 1, H0100: 1, | | |
| | | | | | | | H0494: 1, H0560: 1, | | |
| | | | | | | | H0561: 1, H0633: 1, | | |
| | | | | | | | L0762: 1, L0763: 1, | | |
| | | | | | | | L0638: 1, L0772: 1, | | |
| | | | | | | | L0773: 1, L0521: 1, | | |
| | | | | | | | L0768: 1, L0794: 1, | | |
| | | | | | | | L0803: 1, L0809: 1, | | |
| | | | | | | | L0545: 1, L0664: 1, | | |
| | | | | | | | L0665: 1, H0144: 1, | | |
| | | | | | | | S0126: 1, H0660: 1, | | |
| | | | | | | | H0672: 1, S0378: 1, | | |
| | | | | | | | S0380: 1, S0350: 1, | | |
| | | | | | | | H0555: 1, H0436: 1, | | |
| | | | | | | | H0540: 1, S0390: 1, | | |
| | | | | | | | S0206: 1, S0032: 1, | | |
| | | | | | | | L0741: 1, L0749: 1, | | |
| | | | | | | | L0786: 1, L0777: 1, | | |
| | | | | | | | L0758: 1, S0026: 1 and | | |
| | | | | | | | H0506: 1. | | |
| | | 948630 | 491 | 3-464 | 1089 | Pro-1 to Ala-12. | | | |
| 185 | HAQBZ89 | 1083554 | 195 | 54-1034 | 793 | Pro-43 to Asn-61, | AR061: 9, AR089: 6 | | |
| | | | | | | Ala-77 to Arg-82, | L0659: 4, L0758: 4, | | |
| | | | | | | Glu-207 to His-212, | L0777: 3, S0360: 2, | | |
| | | | | | | Glu-252 to Glu-261, | L0775: 2, L0750: 2, | | |
| | | | | | | Asp-279 to Asn-284. | L0731: 2, H0295: 1, | | |
| | | | | | | | S0218: 1, H0255: 1, | | |
| | | | | | | | H0402: 1, L0717: 1, | | |
| | | | | | | | H0411: 1, H0015: 1, | | |
| | | | | | | | H0030: 1, H0644: 1, | | |
| | | | | | | | H0673: 1, H0087: 1, | | |
| | | | | | | | L0770: 1, L0769: 1, | | |
| | | | | | | | L0637: 1, L0761: 1, | | |
| | | | | | | | L0646: 1, L0387: 1, | | |
| | | | | | | | L0766: 1, L0776: 1, | | |
| | | | | | | | L0655: 1, L0789: 1, | | |
| | | | | | | | H0683: 1, S0027: 1, | | |
| | | | | | | | L0748: 1, L0779: 1 and | | |
| | | | | | | | L0757: 1. | | |
| | | 949061 | 492 | 2-325 | 1090 | Ala-20 to Arg-25. | | | |
| 186 | HELHF07 | 949067 | 196 | 65-340 | 794 | Thr-16 to Pro-21. | AR061: 5, AR089: 4 | | |
| | | | | | | | S0045: 2 | | |
| 187 | HE9QQ22 | 1127726 | 197 | 41-436 | 795 | | AR061: 11, AR089: 3 | | |
| | | | | | | | L0748: 3, H0144: 2, | | |
| | | | | | | | H0632: 1 and L0581: 1. | | |
| | | 949080 | 493 | 3-563 | 1091 | | | | |
| 188 | HSDSB06 | 1128280 | 198 | 3-863 | 796 | Ile-25 to Asn-36, | AR061: 4, AR089: 3 | | |
| | | | | | | Glu-54 to Val-63, | H0590: 7, L0754: 5, | | |
| | | | | | | Gly-81 to Glu-86, | H0156: 3, L0731: 3, | | |
| | | | | | | Gly-108 to Thr-114, | L0600: 3, S0360: 2, | | |
| | | | | | | Val-125 to Ser-131. | H0339: 2, S0472: 2, | | |
| | | | | | | | L0803: 2, L0751: 2, | | |
| | | | | | | | L0779: 2, L0759: 2, | | |
| | | | | | | | S0031: 2, L0596: 2, | | |
| | | | | | | | S0212: 1, H0411: 1, | | |
| | | | | | | | S0222: 1, H0409: 1, | | |
| | | | | | | | H0601: 1, H0333: 1, | | |
| | | | | | | | H0632: 1, H0427: 1, | | |
| | | | | | | | L0021: 1, H0037: 1, | | |
| | | | | | | | H0596: 1, H0024: 1, | | |
| | | | | | | | H0239: 1, S6028: 1, | | |
| | | | | | | | H0266: 1, H0687: 1, | | |
| | | | | | | | H0328: 1, H0644: 1, | | |
| | | | | | | | H0674: 1, H0598: 1, | | |
| | | | | | | | T0067: 1, H0509: 1, | | |
| | | | | | | | L0763: 1, L0772: 1, | | |
| | | | | | | | L0764: 1, L0771: 1, | | |
| | | | | | | | L0773: 1, L0650: 1, | | |
| | | | | | | | L0806: 1, L0659: 1, | | |
| | | | | | | | L0547: 1, L0809: 1, | | |
| | | | | | | | L0666: 1, L0663: 1, | | |
| | | | | | | | L0665: 1, S0328: 1, | | |
| | | | | | | | S0380: 1, S0390: 1, | | |
| | | | | | | | S0032: 1, L0744: 1, | | |
| | | | | | | | L0745: 1, L0746: 1, | | |
| | | | | | | | L0747: 1, L0756: 1, | | |
| | | | | | | | L0777: 1, L0758: 1, | | |
| | | | | | | | L0588: 1, S0276: 1, | | |
| | | | | | | | S0196: 1, S0412: 1 and | | |
| | | | | | | | H0506: 1. | | |
| | | 949151 | 494 | 3-863 | 1092 | Ile-25 to Asn-36, | | | |
| | | | | | | Glu-54 to Val-63, | | | |
| | | | | | | Gly-81 to Glu-86, | | | |
| | | | | | | Gly-108 to Thr-114, | | | |
| | | | | | | Val-125 to Ser-131. | | | |
| 189 | HACAD35 | 949199 | 199 | 1473-916 | 797 | Leu-9 to Leu-18, | AR061: 2, AR089: 1 | | |
| | | | | | | Ala-49 to Gly-55, | L0637: 2, L0783: 2, | | |
| | | | | | | Gly-66 to Glu-74, | L0777: 2, S6022: 1, | | |
| | | | | | | Ala-95 to Gln-100. | H0392: 1, H0586: 1, | | |
| | | | | | | | H0050: 1, L0809: 1, | | |
| | | | | | | | L0759: 1 and S0192: 1. | | |
| 190 | HEQAP17 | 949358 | 200 | 819-295 | 798 | | AR051: 744, AR054: | | |
| | | | | | | | 681, AR050: 564, | | |
| | | | | | | | AR061: 2, AR089: 1 | | |
| | | | | | | | S0192: 3, H0544: 1, | | |
| | | | | | | | L0766: 1, L0804: 1, | | |
| | | | | | | | H0521: 1 and L0747: 1. | | |
| 191 | HMTBB17 | 1128589 | 201 | 1-366 | 799 | Arg-18 to Pro-23, | AR089: 3, AR061: 3 | | |
| | | | | | | Pro-25 to Gly-37, | L0438: 3, L0439: 3, | | |
| | | | | | | Ile-48 to Ile-61, | L0749: 3, L0758: 3, | | |
| | | | | | | Asp-69 to Gly-74, | L0766: 2, L0375: 2, | | |
| | | | | | | Ser-105 to Asn-112. | L0731: 2, L0759: 2, | | |
| | | | | | | | L0803: 1, L0655: 1, | | |
| | | | | | | | L0517: 1, L0666: 1, | | |
| | | | | | | | L0664: 1, H0518: 1, | | |
| | | | | | | | L0748: 1, L0779: 1, | | |
| | | | | | | | L0599: 1 and H0008: 1. | | |
| | | 950884 | 495 | 513-100 | 1093 | Arg-34 to Pro-39, | | | |
| | | | | | | Pro-41 to Gly-53, | | | |
| | | | | | | Ile-64 to Ile-77, | | | |
| | | | | | | Asp-85 to Gly-90, | | | |
| | | | | | | Ser-121 to Asn-128. | | | |
| 192 | HKGDE58 | 1129137 | 202 | 2-541 | 800 | Asp-1 to Cys-10, | AR089: 2, AR061: 2 | | |
| | | | | | | Glu-31 to Pro-38, | H0538: 1, L0803: 1 | | |
| | | | | | | Met-43 to Val-48, | and L0731: 1. | | |
| | | | | | | Asp-97 to Phe-110, | | | |
| | | | | | | Asp-119 to Gly-137. | | | |
| | | 945039 | 496 | 11-937 | 1094 | Asp-17 to Cys-26, | | | |
| | | | | | | Glu-47 to Pro-54, | | | |
| | | | | | | Met-59 to Val-64, | | | |
| | | | | | | Asp-113 to Phe-126, | | | |
| | | | | | | Asp-135 to Gly-153. | | | |
| | | 950885 | 497 | 469-119 | 1095 | Ser-20 to Gly-32, | | | |
| | | | | | | Ile-43 to Ile-56, | | | |
| | | | | | | Asp-64 to Gly-69, | | | |
| | | | | | | Ser-100 to Asn-107. | | | |
| 193 | HCHMW40 | 1144323 | 203 | 539-3 | 801 | Phe-1 to Trp-6, | AR089: 9, AR061: 4 | | |
| | | | | | | Ser-41 to Arg-56, | H0586: 14, H0587: 8, | | |
| | | | | | | Pro-162 to Leu-174. | L0763: 6, H0592: 4, | | |
| | | | | | | | H0484: 3, H0081: 3, | | |
| | | | | | | | H0063: 3, H0483: 2, | | |
| | | | | | | | H0664: 2, H0601: 1, | | |
| | | | | | | | H0600: 1, H0494: 1, | | |
| | | | | | | | L0648: 1, H0658: 1, | | |
| | | | | | | | S0328: 1 and L0747: 1. | | |
| | | 951518 | 498 | 84-572 | 1096 | Ser-7 to Gly-14, | | | |
| | | | | | | Leu-22 to Ala-28, | | | |
| | | | | | | Thr-57 to Ser-62. | | | |
| 194 | HE8QZ34 | 1143411 | 204 | 2-1306 | 802 | Ser-85 to Arg-90, | AR089: 4, AR061: 1 | | |
| | | | | | | His-99 to Met-105, | H0046: 4, H0591: 2, | | |
| | | | | | | Met-119 to Val-125, | T0067: 2, L0766: 2, | | |
| | | | | | | Lys-127 to Ile-133, | H0144: 2, H0521: 2, | | |
| | | | | | | Lys-215 to Tyr-221, | L0744: 2, L0439: 2, | | |
| | | | | | | Phe-239 to Lys-247, | H0170: 1, H0013: 1, | | |
| | | | | | | Asn-293 to Asp-298, | H0599: 1, S0182: 1, | | |
| | | | | | | Gln-404 to Tyr-411. | H0051: 1, H0510: 1, | | |
| | | | | | | | S6028: 1, L0455: 1, | | |
| | | | | | | | H0616: 1, S0422: 1, | | |
| | | | | | | | S0374: 1, L0438: 1, | | |
| | | | | | | | S0390: 1, L0748: 1 and | | |
| | | | | | | | L0604: 1. | | |
| | | 952283 | 499 | 3-1025 | 1097 | Ser-85 to Arg-90, | | | |
| | | | | | | His-99 to Met-105, | | | |
| | | | | | | Met-119 to Val-125, | | | |
| | | | | | | Lys-127 to Ile-133, | | | |
| | | | | | | Lys-215 to Tyr-221, | | | |
| | | | | | | Phe-239 to Lys-247, | | | |
| | | | | | | Asn-293 to Gly-298. | | | |
| 195 | HWAFG04 | 1227627 | 205 | 2-850 | 803 | Gln-103 to Asp-113, | AR089: 17, AR061: 8 | | |
| | | | | | | Ser-182 to Phe-200, | L0789: 4, L0758: 4, | | |
| | | | | | | Cys-211 to Ser-221, | H0657: 3, H0052: 3, | | |
| | | | | | | Gln-233 to Ala-238, | L0438: 3, L0744: 3, | | |
| | | | | | | Glu-256 to Ser-264. | L0779: 3, L0005: 2, | | |
| | | | | | | | H0581: 2, H0194: 2, | | |
| | | | | | | | H0046: 2, H0038: 2, | | |
| | | | | | | | L0800: 2, L0659: 2, | | |
| | | | | | | | H0521: 2, L0743: 2, | | |
| | | | | | | | L0439: 2, H0556: 1, | | |
| | | | | | | | S0282: 1, S0358: 1, | | |
| | | | | | | | H0619: 1, H0586: 1, | | |
| | | | | | | | H0618: 1, H0231: 1, | | |
| | | | | | | | S0362: 1, H0622: 1, | | |
| | | | | | | | T0006: 1, H0616: 1, | | |
| | | | | | | | H0413: 1, H0623: 1, | | |
| | | | | | | | L0351: 1, S0150: 1, | | |
| | | | | | | | L0769: 1, L0372: 1, | | |
| | | | | | | | L0662: 1, L0794: 1, | | |
| | | | | | | | L0775: 1, L0651: 1, | | |
| | | | | | | | L0527: 1, L0657: 1, | | |
| | | | | | | | L0666: 1, H0547: 1, | | |
| | | | | | | | H0690: 1, H0658: 1, | | |
| | | | | | | | H0672: 1, H0539: 1, | | |
| | | | | | | | S0378: 1, H0555: 1, | | |
| | | | | | | | L0754: 1, L0747: 1, | | |
| | | | | | | | L0780: 1, L0596: 1, | | |
| | | | | | | | S0192: 1, H0542: 1 and | | |
| | | | | | | | H0423: 1. | | |
| | | 952878 | 500 | 1658-789 | 1098 | Gln-110 to Asp-120, | | | |
| | | | | | | Ser-189 to Phe-207, | | | |
| | | | | | | Cys-218 to Ser-228, | | | |
| | | | | | | Gln-240 to Ala-245, | | | |
| | | | | | | Glu-263 to Ser-271. | | | |
| 196 | HTEKT33 | 1075836 | 206 | 189-1268 | 804 | Pro-19 to Gly-24, | AR089: 15, AR061: 9 | | |
| | | | | | | Val-41 to Phe-47, | L0766: 4, L0745: 3, | | |
| | | | | | | Lys-75 to Asp-83, | L0752: 3, S0360: 2, | | |
| | | | | | | Ser-138 to Gln-154, | L0748: 2, L0746: 2, | | |
| | | | | | | Asp-230 to Ser-235, | L0755: 2, H0624: 1, | | |
| | | | | | | Asp-278 to Thr-283, | S0114: 1, H0098: 1, | | |
| | | | | | | Pro-315 to Ser-324, | L0471: 1, H0083: 1, | | |
| | | | | | | Trp-338 to Thr-344. | H0428: 1, L0483: 1, | | |
| | | | | | | | H0090: 1, H0616: 1, | | |
| | | | | | | | H0494: 1, H0560: 1, | | |
| | | | | | | | H0509: 1, L0761: 1, | | |
| | | | | | | | L0772: 1, L0803: 1, | | |
| | | | | | | | L0776: 1, L0655: 1, | | |
| | | | | | | | L0792: 1, L0664: 1, | | |
| | | | | | | | S0374: 1, L0438: 1, | | |
| | | | | | | | H0520: 1, H0519: 1, | | |
| | | | | | | | H0435: 1, H0648: 1, | | |
| | | | | | | | S0152: 1, H0521: 1, | | |
| | | | | | | | H0478: 1, L0747: 1, | | |
| | | | | | | | L0756: 1, L0779: 1, | | |
| | | | | | | | L0758: 1, L0759: 1, | | |
| | | | | | | | H0667: 1, H0543: 1 and | | |
| | | | | | | | L0465: 1. | | |
| | | 953308 | 501 | 200-1426 | 1099 | | | | |
| 197 | HBXDM07 | 1206657 | 207 | 1-1806 | 805 | Leu-89 to Tyr-96, | AR089: 9, AR061: 1 | | |
| | | | | | | Leu-195 to Glu-209, | L0777: 7, L0747: 5, | | |
| | | | | | | Val-253 to Ser-259, | H0556: 4, L0794: 4, | | |
| | | | | | | Ile-274 to Phe-279, | L0592: 4, H0497: 3, | | |
| | | | | | | Lys-317 to His-323, | H0052: 3, L0803: 3, | | |
| | | | | | | Lys-338 to Phe-345, | H0087: 2, L0439: 2, | | |
| | | | | | | Ile-361 to Ser-366, | L0749: 2, L0593: 2, | | |
| | | | | | | Glu-370 to Gln-375, | H0459: 1, S0046: 1, | | |
| | | | | | | Lys-398 to Lys-404, | L0717: 1, H0575: 1, | | |
| | | | | | | Val-482 to Arg-492, | S0010: 1, H0390: 1, | | |
| | | | | | | Met-539 to Glu-548, | H0194: 1, H0050: 1, | | |
| | | | | | | Gly-573 toTyr-578. | H0375: 1, L0055: 1, | | |
| | | | | | | | S0036: 1, H0059: 1, | | |
| | | | | | | | S0038: 1, H0494: 1, | | |
| | | | | | | | S0002: 1, L0809: 1, | | |
| | | | | | | | L0789: 1, L0663: 1, | | |
| | | | | | | | L0665: 1, S0330: 1, | | |
| | | | | | | | H0521: 1, H0522: 1, | | |
| | | | | | | | H0696: 1, H0555: 1, | | |
| | | | | | | | S0028: 1, L0731: 1, | | |
| | | | | | | | L0759: 1, L0581: 1, | | |
| | | | | | | | H0542: 1 and H0422: 1. | | |
| | | 953622 | 502 | 81-716 | 1100 | | | | |
| 198 | HFPFA83 | 955614 | 208 | 187-735 | 806 | Thr-9 to Val-16. | AR054: 375, AR051: | | |
| | | | | | | | 284, AR050: 235, | | |
| | | | | | | | AR061: 96, AR089: 33 | | |
| | | | | | | | H0620: 2, H0024: 2, | | |
| | | | | | | | H0208: 1, S0222: 1, | | |
| | | | | | | | H0194: 1, H0123: 1, | | |
| | | | | | | | H0051: 1 and S0052: 1. | | |
| 199 | HKADO36 | 1189002 | 209 | 3-815 | 807 | Ala-6 to Pro-12, | AR089: 2, AR061: 1 | | |
| | | | | | | Glu-22 to Ala-41, | H0069: 2, H0497: 1, | | |
| | | | | | | Ser-230 to Ala-238, | H0494: 1, L0769: 1, | | |
| | | | | | | Asp-257 to Ser-268. | S0028: 1 and H0542: 1. | | |
| | | 956115 | 503 | 2-280 | 1101 | | | | |
| 200 | HFXKG51 | 956596 | 210 | 578-3 | 808 | His-13 to Asn-24, | AR089: 2, AR061: 1 | | |
| | | | | | | Pro-147 to Asn-157, | S0028: 2, S0282: 1 and | | |
| | | | | | | Gln-164 to Glu-169. | S0051: 1. | | |
| 201 | HFPHR82 | 1187749 | 211 | 3-1328 | 809 | Ile-258 to Val-271, | AR089: 3, AR061: 1 | | |
| | | | | | | Gln-298 to Gln-303, | L0747: 12, L0755: 12, | | |
| | | | | | | Ile-318 to Leu-324, | L0766: 9, L0438: 9, | | |
| | | | | | | Glu-353 to Leu-361, | L0754: 7, H0046: 6, | | |
| | | | | | | Ser-397 to Arg-408, | L0751: 6, L0752: 6, | | |
| | | | | | | Gly-427 to Leu-433. | H0068: 5, L0775: 5, | | |
| | | | | | | | L0439: 5, S0010: 4, | | |
| | | | | | | | H0547: 4, S0152: 4, | | |
| | | | | | | | L0740: 4, L0779: 4, | | |
| | | | | | | | L0759: 4, H0591: 3, | | |
| | | | | | | | L0771: 3, L0662: 3, | | |
| | | | | | | | L0774: 3, L0666: 3, | | |
| | | | | | | | S0028: 3, L0748: 3, | | |
| | | | | | | | L0756: 3, L0731: 3, | | |
| | | | | | | | L0757: 3, H0624: 2, | | |
| | | | | | | | S0045: 2, H0619: 2, | | |
| | | | | | | | S0222: 2, S0049: 2, | | |
| | | | | | | | H0052: 2, H0615: 2, | | |
| | | | | | | | S0036: 2, T0041: 2, | | |
| | | | | | | | H0509: 2, S0002: 2, | | |
| | | | | | | | S0426: 2, L0769: 2, | | |
| | | | | | | | L0776: 2, L0659: 2, | | |
| | | | | | | | H0521: 2, H0707: 2, | | |
| | | | | | | | L0594: 2, L0362: 2, | | |
| | | | | | | | S0011: 2, H0170: 1, | | |
| | | | | | | | H0171: 1, H0685: 1, | | |
| | | | | | | | S0040: 1, T0049: 1, | | |
| | | | | | | | H0657: 1, S0001: 1, | | |
| | | | | | | | H0638: 1, S0358: 1, | | |
| | | | | | | | S0360: 1, S0408: 1, | | |
| | | | | | | | H0637: 1, S0007: 1, | | |
| | | | | | | | S0132: 1, S6022: 1, | | |
| | | | | | | | H0550: 1, H0431: 1, | | |
| | | | | | | | H0455: 1, H0574: 1, | | |
| | | | | | | | H0486: 1, T0114: 1, | | |
| | | | | | | | H0250: 1, H0069: 1, | | |
| | | | | | | | H0156: 1, L0105: 1, | | |
| | | | | | | | H0597: 1, H0546: 1, | | |
| | | | | | | | H0545: 1, H0050: 1, | | |
| | | | | | | | L0163: 1, H0594: 1, | | |
| | | | | | | | H0266: 1, H0290: 1, | | |
| | | | | | | | S0214: 1, H0328: 1, | | |
| | | | | | | | H0688: 1, H0622: 1, | | |
| | | | | | | | H0032: 1, H0673: 1, | | |
| | | | | | | | H0674: 1, S0364: 1, | | |
| | | | | | | | H0090: 1, H0040: 1, | | |
| | | | | | | | H0551: 1, T0067: 1, | | |
| | | | | | | | H0268: 1, H0100: 1, | | |
| | | | | | | | H0494: 1, H0560: 1, | | |
| | | | | | | | H0561: 1, H0633: 1, | | |
| | | | | | | | L0762: 1, L0763: 1, | | |
| | | | | | | | L0638: 1, L0772: 1, | | |
| | | | | | | | L0773: 1, L0521: 1, | | |
| | | | | | | | L0768: 1, L0794: 1, | | |
| | | | | | | | L0803: 1, L0809: 1, | | |
| | | | | | | | L0545: 1, L0664: 1, | | |
| | | | | | | | L0665: 1, H0144: 1, | | |
| | | | | | | | S0126: 1, H0660: 1, | | |
| | | | | | | | H0672: 1, S0378: 1, | | |
| | | | | | | | S0380: 1, S0350: 1, | | |
| | | | | | | | H0555: 1, H0436: 1, | | |
| | | | | | | | H0540: 1, S0390: 1, | | |
| | | | | | | | S0206: 1, S0032: 1, | | |
| | | | | | | | L0741: 1, L0749: 1, | | |
| | | | | | | | L0786: 1, L0777: 1, | | |
| | | | | | | | L0758: 1, S0026: 1 and | | |
| | | | | | | | H0506: 1. | | |
| | | 957528 | 504 | 1592-273 | 1102 | Ile-256 to Val-269, | | | |
| | | | | | | Gln-296 to Gln-301, | | | |
| | | | | | | Ile-316 to Leu-322, | | | |
| | | | | | | Glu-351 to Leu-359, | | | |
| | | | | | | Ser-395 to Arg-406, | | | |
| | | | | | | Gly-425 to Leu-431. | | | |
| 202 | HISAF59 | 959140 | 212 | 130-843 | 810 | Gly-33 to Ser-48. | AR089: 2, AR061: 2 | | |
| | | | | | | | L0789: 4, L0758: 4, | | |
| | | | | | | | H0657: 3, H0052: 3, | | |
| | | | | | | | H0046: 3, L0438: 3, | | |
| | | | | | | | L0744: 3, L0779: 3, | | |
| | | | | | | | L0005: 2, H0586: 2, | | |
| | | | | | | | H0581: 2, H0194: 2, | | |
| | | | | | | | H0038: 2, L0800: 2, | | |
| | | | | | | | L0659: 2, H0521: 2, | | |
| | | | | | | | L0743: 2, L0439: 2, | | |
| | | | | | | | H0556: 1, S0282: 1, | | |
| | | | | | | | S0358: 1, H0619: 1, | | |
| | | | | | | | H0618: 1, H0231: 1, | | |
| | | | | | | | H0569: 1, S0362: 1, | | |
| | | | | | | | H0622: 1, T0006: 1, | | |
| | | | | | | | H0135: 1, H0616: 1, | | |
| | | | | | | | H0413: 1, H0623: 1, | | |
| | | | | | | | L0351: 1, S0150: 1, | | |
| | | | | | | | L0769: 1, L0372: 1, | | |
| | | | | | | | L0662: 1, L0794: 1, | | |
| | | | | | | | L0775: 1, L0651: 1, | | |
| | | | | | | | L0527: 1, L0657: 1, | | |
| | | | | | | | L0666: 1, H0144: 1, | | |
| | | | | | | | H0547: 1, H0690: 1, | | |
| | | | | | | | H0658: 1, H0672: 1, | | |
| | | | | | | | H0539: 1, S0378: 1, | | |
| | | | | | | | H0555: 1, L0754: 1, | | |
| | | | | | | | L0747: 1, L0780: 1, | | |
| | | | | | | | L0596: 1, S0192: 1, | | |
| | | | | | | | H0542: 1 and H0423: 1. | | |
| 203 | HCEHD66 | 1136122 | 213 | 2-562 | 811 | Ala-1 to Lys-6, | AR061: 7, AR089: 3 | | |
| | | | | | | Leu-13 to Gln-25, | L0769: 9, S0051: 4, | | |
| | | | | | | Asp-70 to Gly-75, | H0441: 3, S0036: 3, | | |
| | | | | | | Gly-92 to Lys-97, | L0809: 3, L0789: 3, | | |
| | | | | | | Asp-106 to Tyr-112, | L0438: 3, L0439: 3, | | |
| | | | | | | Leu-135 to Val-146, | L0731: 3, H0052: 2, | | |
| | | | | | | Glu-165 to Asp-173. | H0687: 2, H0181: 2, | | |
| | | | | | | | L0800: 2, L0794: 2, | | |
| | | | | | | | L0665: 2, L0741: 2, | | |
| | | | | | | | L0742: 2, L0756: 2, | | |
| | | | | | | | S0031: 2, H0171: 1, | | |
| | | | | | | | H0556: 1, S6024: 1, | | |
| | | | | | | | S0029: 1, H0411: 1, | | |
| | | | | | | | S0278: 1, H0455: 1, | | |
| | | | | | | | H0486: 1, L0109: 1, | | |
| | | | | | | | H0251: 1, L0163: 1, | | |
| | | | | | | | H0617: 1, H0413: 1, | | |
| | | | | | | | L0762: 1, L0638: 1, | | |
| | | | | | | | L0639: 1, L0761: 1, | | |
| | | | | | | | L0764: 1, L0662: 1, | | |
| | | | | | | | L0774: 1, L0807: 1, | | |
| | | | | | | | L0657: 1, S0053: 1, | | |
| | | | | | | | S0126: 1, H0626: 1, | | |
| | | | | | | | L0747: 1, L0757: 1, | | |
| | | | | | | | L0759: 1, L0597: 1 and | | |
| | | | | | | | L0608: 1. | | |
| | | 959160 | 505 | 2-583 | 1103 | Arg-1 to Lys-13, | | | |
| | | | | | | Leu-20 to Gln-32, | | | |
| | | | | | | Asp-77 to Gly-82, | | | |
| | | | | | | Gly-99 to Lys-104, | | | |
| | | | | | | Asp-113 to Tyr-119, | | | |
| | | | | | | Leu-142 to Val-153, | | | |
| | | | | | | Glu-172 to Asp-180. | | | |
| 204 | HE8UY74 | 1163590 | 214 | 1-492 | 812 | | AR061: 2, AR089: 1 | | |
| | | | | | | | H0013: 1 and S0027: 1. | | |
| | | 960914 | 506 | 111-455 | 1104 | | | | |
| 205 | HAHIY08 | 962113 | 215 | 3-278 | 813 | | AR061: 10, AR089: 6 | | |
| 206 | H2CBH45 | 1128919 | 216 | 2-841 | 814 | Leu-2 to Lys-10, | AR061: 3, AR089: 3 | | |
| | | | | | | Ala-29 to Pro-43, | H0437: 1, S0280: 1, | | |
| | | | | | | Ser-63 to Thr-79, | T0110: 1, H0622: 1, | | |
| | | | | | | Pro-87 to Pro-104. | L0745: 1, L0746: 1, | | |
| | | | | | | | L0731: 1 and L0596: 1. | | |
| | | 963811 | 507 | 2-421 | 1105 | Ala-1 to Met-18, | | | |
| | | | | | | Leu-20 to Asn-26, | | | |
| | | | | | | Val-38 to Leu-46, | | | |
| | | | | | | Pro-48 to Gly-53, | | | |
| | | | | | | Leu-81 to Gly-86, | | | |
| | | | | | | Gln-94 to Tyr-99, | | | |
| | | | | | | Glu-101 to Gly-109. | | | |
| 207 | HMVAM09 | 1194828 | 217 | 3-659 | 815 | Asp-1 to Thr-7, | AR089: 4, AR061: 1 | | |
| | | | | | | Asp-36 to Phe-51, | L0731: 7, L0517: 5, | | |
| | | | | | | Lys-61 to Gly-66, | S0212: 3, L0775: 3, | | |
| | | | | | | Gly-112 to Leu-120, | L0740: 3, H0266: 2, | | |
| | | | | | | Glu-134 to Tyr-150, | L0809: 2, H0696: 2, | | |
| | | | | | | Arg-193 to Lys-205. | L0748: 2, S0132: 1, | | |
| | | | | | | | H0574: 1, H0013: 1, | | |
| | | | | | | | H0544: 1, H0023: 1, | | |
| | | | | | | | H0071: 1, H0286: 1, | | |
| | | | | | | | H0100: 1, H0494: 1, | | |
| | | | | | | | S0370: 1, L0770: 1, | | |
| | | | | | | | L0646: 1, L0764: 1, | | |
| | | | | | | | L0771: 1, L0363: 1, | | |
| | | | | | | | L0774: 1, L0659: 1, | | |
| | | | | | | | L0789: 1, L0666: 1, | | |
| | | | | | | | S0126: 1, H0522: 1, | | |
| | | | | | | | L0754: 1, L0747: 1 and | | |
| | | | | | | | L0755: 1. | | |
| | | 963814 | 508 | 2-802 | 1106 | | | | |
| 208 | HFPEN04 | 1199663 | 218 | 96-1646 | 816 | Glu-62 to Tyr-67, | AR061: 5, AR089: 2 | | |
| | | | | | | Pro-169 to Lys-179, | S0010: 4, S0222: 3, | | |
| | | | | | | Pro-189 to Ala-201, | H0455: 2, L0803: 2, | | |
| | | | | | | Ala-218 to Arg-223, | L0439: 2, L0745: 2, | | |
| | | | | | | Tyr-324 to Asn-331, | S0282: 1, S0400: 1, | | |
| | | | | | | Gly-352 to Val-357, | H0456: 1, H0441: 1, | | |
| | | | | | | Leu-365 to Lys-371, | S0346: 1, H0509: 1, | | |
| | | | | | | His-393 to Ala-399, | L0769: 1, L0438: 1, | | |
| | | | | | | Asp-420 to Asn-425, | L0756: 1 and S0106: 1. | | |
| | | | | | | Thr-460 to Lys-473, | | | |
| | | | | | | Ser-488 to Gly-502. | | | |
| | | 964824 | 509 | 88-540 | 1107 | Glu-62 to Tyr-67, | | | |
| | | | | | | Ser-129 to Asp-135. | | | |
| 209 | HSLJD02 | 1104452 | 219 | 67-927 | 817 | Leu-53 to Gln-58, | AR054: 7, AR051: 1, | | |
| | | | | | | Phe-162 to Gly-167, | AR089: 1, AR061: 1, | | |
| | | | | | | Gln-282 to Ala-287. | AR050: 0 | | |
| | | | | | | | S0390: 1 | | |
| | | 965826 | 510 | 47-907 | 1108 | Leu-53 to Gln-58, | | | |
| | | | | | | Phe-162 to Gly-167, | | | |
| | | | | | | Gln-282 to Ala-287. | | | |
| 210 | HDPFZ30 | 1220164 | 220 | 1637-819 | 818 | Leu-31 to Gly-41, | AR089: 6, AR061: 2 | | |
| | | | | | | Arg-137 to Ser-143, | H0250: 5, L0770: 2, | | |
| | | | | | | Glu-241 to Glu-260. | L0438: 2, L0439: 2, | | |
| | | | | | | | L0754: 2, S0114: 1, | | |
| | | | | | | | H0459: 1, H0489: 1, | | |
| | | | | | | | S0278: 1, H0069: 1, | | |
| | | | | | | | H0575: 1, H0318: 1, | | |
| | | | | | | | H0123: 1, L0471: 1, | | |
| | | | | | | | H0071: 1, H0328: 1, | | |
| | | | | | | | H0634: 1, T0067: 1, | | |
| | | | | | | | L0351: 1, H0560: 1, | | |
| | | | | | | | S0142: 1, S0344: 1, | | |
| | | | | | | | S0426: 1, L0763: 1, | | |
| | | | | | | | L0769: 1, L0761: 1, | | |
| | | | | | | | L0662: 1, L0363: 1, | | |
| | | | | | | | L0364: 1, L0805: 1, | | |
| | | | | | | | L0666: 1, L0664: 1, | | |
| | | | | | | | S0126: 1, H0658: 1, | | |
| | | | | | | | H0670: 1, H0521: 1, | | |
| | | | | | | | H0522: 1, S0044: 1, | | |
| | | | | | | | H0555: 1, H0576: 1, | | |
| | | | | | | | L0748: 1 and L0755: 1. | | |
| | | 966752 | 511 | 1637-819 | 1109 | Leu-31 to Gly-41, | | | |
| | | | | | | Arg-137 to Ser-143, | | | |
| | | | | | | Glu-241 to Glu-260. | | | |
| 211 | HPJCR33 | 1217931 | 221 | 140-1681 | 819 | Ser-1 to Leu-13, | AR089: 2, AR061: 1 | | |
| | | | | | | Pro-17 to Gly-31, | L0754: 8, L0777: 8, | | |
| | | | | | | Thr-44 to Leu-54, | L0439: 5, H0266: 2, | | |
| | | | | | | His-84 to Arg-95, | L0438: 2, H0672: 2, | | |
| | | | | | | Asn-105 to Gln-116, | S0152: 2, L0745: 2, | | |
| | | | | | | Pro-132 to Leu-138, | L0758: 2, H0650: 1, | | |
| | | | | | | Glu-148 to Gly-157, | S0212: 1, S0045: 1, | | |
| | | | | | | Arg-180 to Trp-185, | S0046: 1, H0486: 1, | | |
| | | | | | | Asn-340 to Glu-346, | L0563: 1, H0051: 1, | | |
| | | | | | | Asn-401 to Cys-412, | H0644: 1, H0673: 1, | | |
| | | | | | | Asp-430 to Ala-435, | H0551: 1, H0269: 1, | | |
| | | | | | | Thr-473 to Lys-478, | S0344: 1, L0794: 1, | | |
| | | | | | | Pro-490 to Tyr-498. | L0766: 1, L0803: 1, | | |
| | | | | | | | L0805: 1, L0659: 1, | | |
| | | | | | | | H0547: 1, H0519: 1, | | |
| | | | | | | | S0126: 1, H0711: 1, | | |
| | | | | | | | H0528: 1, S0028: 1, | | |
| | | | | | | | L0750: 1, L0780: 1, | | |
| | | | | | | | L0757: 1, L0588: 1, | | |
| | | | | | | | L0591: 1, S0192: 1, | | |
| | | | | | | | H0423: 1 and H0293: 1. | | |
| | | 966758 | 512 | 1-375 | 1110 | | | | |
| 212 | HTOAK34 | 1081321 | 222 | 784-599 | 820 | Ser-10 to His-15. | AR089: 1, AR061: 1 | | |
| | | | | | | | L0766: 2, H0264: 1 | | |
| | | | | | | | and H0521: 1. | | |
| | | 966800 | 513 | 918-1196 | 1111 | Ser-67 to Trp-77. | | | |
| 213 | HE8NI24 | 971296 | 223 | 318-749 | 821 | | AR050: 3, AR051: 1, | | |
| | | | | | | | AR089: 0, AR061: 0 | | |
| | | | | | | | H0013: 3, L0794: 2, | | |
| | | | | | | | L0439: 2, L0756: 2, | | |
| | | | | | | | L0779: 2, L0758: 2, | | |
| | | | | | | | S0001: 1, H0619: 1, | | |
| | | | | | | | L0638: 1, L0641: 1, | | |
| | | | | | | | L0776: 1 and H0435: 1. | | |
| 214 | HAMFM39 | 1055532 | 224 | 782-2344 | 822 | Gly-1 to Pro-7, | AR050: 193, AR054: | | |
| | | | | | | Gly-23 to Gly-50, | 122, AR051: 84, | | |
| | | | | | | Ser-53 to Pro-84, | AR089: 0, AR061: 0 | | |
| | | | | | | Ser-89 to Thr-129, | H0255: 59, H0254: 10, | | |
| | | | | | | Gly-140 to Gly-145, | H0617: 9, L0747: 8, | | |
| | | | | | | Pro-148 to Lys-158, | S0358: 7, H0486: 6, | | |
| | | | | | | Thr-161 to Ser-167, | L0655: 6, H0208: 4, | | |
| | | | | | | Leu-179 to Arg-189, | H0545: 4, H0024: 4, | | |
| | | | | | | Pro-203 to Lys-211, | S0354: 3, H0250: 3, | | |
| | | | | | | Glu-233 to Asp-240, | H0123: 3, H0031: 3, | | |
| | | | | | | Lys-261 to Gly-288, | L0659: 3, S0328: 3, | | |
| | | | | | | Arg-296 to Glu-305, | L0731: 3, H0583: 2, | | |
| | | | | | | Ala-315 to Arg-353, | L0808: 2, L0785: 2, | | |
| | | | | | | Glu-372 to Pro-382, | H0662: 2, H0586: 2, | | |
| | | | | | | Gln-395 to Glu-408, | H0618: 2, H0253: 2, | | |
| | | | | | | Asn-419 to Gly-427, | H0424: 2, H0264: 2, | | |
| | | | | | | Ala-458 to Gly-463, | H0488: 2, H0100: 2, | | |
| | | | | | | Pro-477 to Ala-483. | L0771: 2, L0806: 2, | | |
| | | | | | | | L0809: 2, H0144: 2, | | |
| | | | | | | | H0689: 2, L0749: 2, | | |
| | | | | | | | L0750: 2, L0779: 2, | | |
| | | | | | | | L0777: 2, H0707: 2, | | |
| | | | | | | | L0595: 2, H0624: 1, | | |
| | | | | | | | H0341: 1, S0356: 1, | | |
| | | | | | | | S0360: 1, H0619: 1, | | |
| | | | | | | | H0411: 1, H0370: 1, | | |
| | | | | | | | H0485: 1, H0635: 1, | | |
| | | | | | | | H0025: 1, H0108: 1, | | |
| | | | | | | | H0318: 1, H0581: 1, | | |
| | | | | | | | T0110: 1, H0231: 1, | | |
| | | | | | | | L0738: 1, H0086: 1, | | |
| | | | | | | | H0271: 1, T0006: 1, | | |
| | | | | | | | H0644: 1, H0181: 1, | | |
| | | | | | | | H0124: 1, H0087: 1, | | |
| | | | | | | | T0067: 1, H0560: 1, | | |
| | | | | | | | H0646: 1, L0371: 1, | | |
| | | | | | | | L0800: 1, L0764: 1, | | |
| | | | | | | | L0768: 1, L0803: 1, | | |
| | | | | | | | L0774: 1, L0657: 1, | | |
| | | | | | | | L0368: 1, L0787: 1, | | |
| | | | | | | | L0666: 1, L0663: 1, | | |
| | | | | | | | L0665: 1, H0519: 1, | | |
| | | | | | | | H0414: 1, S0378: 1, | | |
| | | | | | | | S0380: 1, H0696: 1, | | |
| | | | | | | | S0044: 1, S0432: 1, | | |
| | | | | | | | L0439: 1, L0780: 1, | | |
| | | | | | | | L0755: 1, H0445: 1 and | | |
| | | | | | | | L0596: 1. | | |
| | | 971347 | 514 | 1121-2929 | 1112 | Gln-1 to Ala-7, | | | |
| | | | | | | Thr-36 to Trp-42, | | | |
| | | | | | | Gly-45 to Gly-52, | | | |
| | | | | | | Glu-77 to Pro-89, | | | |
| | | | | | | Gly-105 to Gly-132, | | | |
| | | | | | | Ser-135 to Glu-162. | | | |
| 215 | HBGMG39 | 1126283 | 225 | 286-14 | 823 | Arg-27 to Gly-40, | AR089: 1, AR061: 0 | | |
| | | | | | | Arg-67 to Asp-91. | L0659: 12, L0769: 10, | | |
| | | | | | | | L0666: 8, L0747: 8, | | |
| | | | | | | | L0759: 7, L0439: 6, | | |
| | | | | | | | L0757: 6, L0756: 5, | | |
| | | | | | | | L0770: 4, L0761: 4, | | |
| | | | | | | | L0663: 4, L0665: 4, | | |
| | | | | | | | H0521: 4, L0749: 4, | | |
| | | | | | | | L0750: 4, L0777: 4, | | |
| | | | | | | | L0758: 4, H0550: 3, | | |
| | | | | | | | H0486: 3, H0544: 3, | | |
| | | | | | | | H0623: 3, L0662: 3, | | |
| | | | | | | | L0794: 3, L0766: 3, | | |
| | | | | | | | L0774: 3, L0664: 3, | | |
| | | | | | | | L0740: 3, L0779: 3, | | |
| | | | | | | | H0423: 3, S0418: 2, | | |
| | | | | | | | S0360: 2, L0717: 2, | | |
| | | | | | | | H0549: 2, H0618: 2, | | |
| | | | | | | | H0581: 2, H0545: 2, | | |
| | | | | | | | H0510: 2, H0617: 2, | | |
| | | | | | | | L0763: 2, L0772: 2, | | |
| | | | | | | | L0642: 2, L0764: 2, | | |
| | | | | | | | L0775: 2, L0655: 2, | | |
| | | | | | | | L0789: 2, S0374: 2, | | |
| | | | | | | | H0658: 2, H0522: 2, | | |
| | | | | | | | H0631: 2, L0745: 2, | | |
| | | | | | | | L0731: 2, H0556: 1, | | |
| | | | | | | | T0049: 1, H0656: 1, | | |
| | | | | | | | L0785: 1, H0483: 1, | | |
| | | | | | | | H0661: 1, H0664: 1, | | |
| | | | | | | | H0662: 1, S0420: 1, | | |
| | | | | | | | S0354: 1, S0358: 1, | | |
| | | | | | | | H0580: 1, S0468: 1, | | |
| | | | | | | | S0132: 1, S0222: 1, | | |
| | | | | | | | H0441: 1, H0586: 1, | | |
| | | | | | | | H0587: 1, H0497: 1, | | |
| | | | | | | | H0069: 1, H0427: 1, | | |
| | | | | | | | S0280: 1, H0046: 1, | | |
| | | | | | | | H0457: 1, H0081: 1, | | |
| | | | | | | | H0024: 1, T0010: 1, | | |
| | | | | | | | H0594: 1, H0188: 1, | | |
| | | | | | | | H0687: 1, H0553: 1, | | |
| | | | | | | | H0124: 1, H0494: 1, | | |
| | | | | | | | H0641: 1, S0422: 1, | | |
| | | | | | | | S0002: 1, S0426: 1, | | |
| | | | | | | | L0372: 1, L0646: 1, | | |
| | | | | | | | L0374: 1, L0648: 1, | | |
| | | | | | | | L0649: 1, L0803: 1, | | |
| | | | | | | | L0651: 1, L0653: 1, | | |
| | | | | | | | L0656: 1, L0635: 1, | | |
| | | | | | | | L0542: 1, L0526: 1, | | |
| | | | | | | | L0783: 1, L0809: 1, | | |
| | | | | | | | L0647: 1, L0791: 1, | | |
| | | | | | | | L0792: 1, H0698: 1, | | |
| | | | | | | | H0699: 1, H0693: 1, | | |
| | | | | | | | H0547: 1, H0689: 1, | | |
| | | | | | | | H0690: 1, H0683: 1, | | |
| | | | | | | | H0670: 1, S0378: 1, | | |
| | | | | | | | S0152: 1, H0555: 1, | | |
| | | | | | | | H0436: 1, S0392: 1, | | |
| | | | | | | | L0742: 1, L0751: 1, | | |
| | | | | | | | L0780: 1, H0668: 1, | | |
| | | | | | | | H0653: 1, S0242: 1, | | |
| | | | | | | | H0542: 1, H0543: 1 and | | |
| | | | | | | | S0460: 1. | | |
| | | 971414 | 515 | 1-195 | 1113 | Pro-1 to Asn-14, | | | |
| | | | | | | Lys-17 to Phe-23, | | | |
| | | | | | | Met-44 to Tyr-50. | | | |
| 216 | HSXBV89 | 1128699 | 226 | 1-2037 | 824 | Gln-25 to Gly-33, | AR054: 23, AR061: 4, | | |
| | | | | | | Pro-49 to Gly-55, | AR089: 3, AR050: 0 | | |
| | | | | | | Gly-89 to Glu-97, | L0439: 31, L0741: 9, | | |
| | | | | | | Ser-176 to Glu-183, | L0438: 7, L0777: 6, | | |
| | | | | | | Thr-231 to Gly-240, | H0052: 5, H0617: 5, | | |
| | | | | | | Pro-267 to Thr-275, | L0748: 4, L0753: 4, | | |
| | | | | | | Pro-297 to Asp-308, | L0769: 3, L0775: 3, | | |
| | | | | | | Asp-340 to Ser-345, | L0776: 3, S0378: 3, | | |
| | | | | | | Arg-353 to Leu-361, | L0779: 3, S0040: 2, | | |
| | | | | | | Pro-375 to Gly-382, | L0103: 2, H0046: 2, | | |
| | | | | | | Glu-393 to Trp-410, | H0284: 2, T0006: 2, | | |
| | | | | | | Gly-470 to Ser-475, | S0036: 2, S0038: 2, | | |
| | | | | | | Tyr-504 to Arg-516, | L0351: 2, S0370: 2, | | |
| | | | | | | Gly-531 to Thr-539, | L0764: 2, H0670: 2, | | |
| | | | | | | Pro-571 to Gln-580, | L0602: 2, L0747: 2, | | |
| | | | | | | Leu-591 to Glu-598, | L0592: 2, S0342: 1, | | |
| | | | | | | Gln-601 to Gly-611, | S0282: 1, S0030: 1, | | |
| | | | | | | Gly-649 to Ser-654, | H0484: 1, S0007: 1, | | |
| | | | | | | Asp-661 to Leu-666, | S0278: 1, H0261: 1, | | |
| | | | | | | Ala-669 to Glu-674. | S0222: 1, H0441: 1, | | |
| | | | | | | | H0156: 1, T0082: 1, | | |
| | | | | | | | H0194: 1, T0010: 1, | | |
| | | | | | | | S6028: 1, H0271: 1, | | |
| | | | | | | | L0483: 1, H0424: 1, | | |
| | | | | | | | H0213: 1, H0181: 1, | | |
| | | | | | | | S0112: 1, S0144: 1, | | |
| | | | | | | | S0002: 1, L0520: 1, | | |
| | | | | | | | L0762: 1, L0763: 1, | | |
| | | | | | | | L0638: 1, L0772: 1, | | |
| | | | | | | | L0768: 1, L0653: 1, | | |
| | | | | | | | L0659: 1, L0636: 1, | | |
| | | | | | | | L0367: 1, L0791: 1, | | |
| | | | | | | | L0665: 1, L0352: 1, | | |
| | | | | | | | H0672: 1, H0539: 1, | | |
| | | | | | | | S0032: 1, L0742: 1, | | |
| | | | | | | | L0740: 1, L0758: 1 and | | |
| | | | | | | | H0667: 1. | | |
| | | 971821 | 516 | 3-509 | 1114 | Gln-20 to Gly-28, | | | |
| | | | | | | Pro-44 to Gly-50. | | | |
| 217 | HBIOZ10 | 1143756 | 227 | 3-572 | 825 | Leu-50 to Asp-61, | AR054: 189, AR051: | | |
| | | | | | | Ser-100 to Leu-107, | 68, AR050: 35, AR089: | | |
| | | | | | | Pro-119 to Leu-125. | 4, AR061: 3 | | |
| | | | | | | | H0593: 1 | | |
| | | 973131 | 517 | 3-503 | 1115 | Leu-50 to Asp-61, | | | |
| | | | | | | Ser-100 to Leu-107, | | | |
| | | | | | | Ala-120 to Thr-130. | | | |
| 218 | HTLEJ11 | 1085651 | 228 | 2-802 | 826 | Tyr-52 to Gln-60. | AR061: 3, AR089: 1 | | |
| | | | | | | | H0618: 3 and H0253: | | |
| | | | | | | | 1. | | |
| | | 973302 | 518 | 2-802 | 1116 | Tyr-52 to Gln-60, | | | |
| | | | | | | Phe-86 to Ala-94, | | | |
| | | | | | | Lys-111 to Arg-118, | | | |
| | | | | | | His-193 to Tyr-198. | | | |
| 219 | HAWAM69 | 1207835 | 229 | 1-1302 | 827 | Val-2 to Cys-17, | AR054: 334, AR050: | | |
| | | | | | | Cys-41 to Gln-52, | 251, AR051: 249, | | |
| | | | | | | Glu-70 to Phe-82, | AR061: 6, AR089: 6 | | |
| | | | | | | Glu-89 to Ser-97, | L0758: 12, L0662: 11, | | |
| | | | | | | Lys-126 to Gly-132, | H0251: 9, L0731: 9, | | |
| | | | | | | Val-134 to Gly-145, | S0360: 5, H0013: 5, | | |
| | | | | | | Glu-167 to Arg-180, | L0659: 5, L0747: 5, | | |
| | | | | | | Glu-187 to Ser-200, | H0252: 4, H0328: 4, | | |
| | | | | | | Cys-204 to Ser-210, | L0666: 4, L0439: 4, | | |
| | | | | | | Glu-213 to Asp-221, | H0135: 3, L0764: 3, | | |
| | | | | | | Thr-260 to Ala-273, | L0783: 3, L0749: 3, | | |
| | | | | | | Ala-278 to Gln-290, | S0358: 2, L0776: 2, | | |
| | | | | | | Ser-317 to His-333, | L0663: 2, H0651: 2, | | |
| | | | | | | Leu-347 to Gly-356, | L0744: 2, L0754: 2, | | |
| | | | | | | Lys-358 to Phe-363, | H0675: 1, H0329: 1, | | |
| | | | | | | Leu-367 to Cys-376, | H0619: 1, L0717: 1, | | |
| | | | | | | Asp-385 to Ser-391, | H0369: 1, H0550: 1, | | |
| | | | | | | Glu-406 to Gly-434. | H0333: 1, H0632: 1, | | |
| | | | | | | | H0486: 1, T0060: 1, | | |
| | | | | | | | H0042: 1, H0575: 1, | | |
| | | | | | | | H0618: 1, H0150: 1, | | |
| | | | | | | | H0123: 1, H0050: 1, | | |
| | | | | | | | H0105: 1, T0003: 1, | | |
| | | | | | | | H0024: 1, H0510: 1, | | |
| | | | | | | | H0594: 1, H0028: 1, | | |
| | | | | | | | H0644: 1, S0364: 1, | | |
| | | | | | | | S0366: 1, H0591: 1, | | |
| | | | | | | | H0100: 1, L0763: 1, | | |
| | | | | | | | L0631: 1, L0637: 1, | | |
| | | | | | | | L0646: 1, L0641: 1, | | |
| | | | | | | | L0644: 1, L0649: 1, | | |
| | | | | | | | L0803: 1, L0775: 1, | | |
| | | | | | | | L0782: 1, L0809: 1, | | |
| | | | | | | | L0519: 1, L0793: 1, | | |
| | | | | | | | L0665: 1, H0144: 1, | | |
| | | | | | | | L0438: 1, H0684: 1, | | |
| | | | | | | | H0672: 1, S0380: 1, | | |
| | | | | | | | L0748: 1, L0759: 1, | | |
| | | | | | | | L0596: 1, L0366: 1, | | |
| | | | | | | | L0600: 1 and H0352: 1. | | |
| | | 943104 | 519 | 1010-1441 | 1117 | Cys-38 to Gly-43, | | | |
| | | | | | | Gly-70 to Pro-82, | | | |
| | | | | | | Arg-129 to Glu-134, | | | |
| | | | | | | Gly-139 to Gly-144. | | | |
| | | 973465 | 520 | 154-2 | 1118 | Leu-23 to Gly-32, | | | |
| | | | | | | Lys-34 to Lys-40. | | | |
| 220 | HSCKD11 | 1056288 | 230 | 1238-2074 | 828 | Ala-20 to Val-28, | AR089: 1, AR061: 1 | | |
| | | | | | | Pro-60 to Cys-66, | H0667: 1 | | |
| | | | | | | Ser-118 to Asp-123, | | | |
| | | | | | | Leu-225 to Asp-236, | | | |
| | | | | | | Thr-267 to His-274. | | | |
| | | 973894 | 521 | 117-326 | 1119 | Ala-6 to Ala-11, | | | |
| | | | | | | Phe-19 to Asn-24, | | | |
| | | | | | | Val-29 to Lys-34. | | | |
| 221 | HDPLT62 | 1027241 | 231 | 195-800 | 829 | Arg-9 to Leu-17, | AR089: 1, AR061: 0 | | |
| | | | | | | Pro-90 to Asn-95, | H0521: 1 | | |
| | | | | | | Lys-115 to Glu-125. | | | |
| | | 973945 | 522 | 405-809 | 1120 | | | | |
| 222 | HTPFX16 | 974296 | 232 | 3-422 | 830 | Asp-40 to Asn-49, | AR061: 3, AR089: 2 | | |
| | | | | | | Cys-65 to Gly-71. | L0750: 2, H0024: 1, | | |
| | | | | | | | H0039: 1, H0622: 1, | | |
| | | | | | | | H0040: 1 and S0434: 1. | | |
| 223 | HE9NO66 | 1079624 | 233 | 362-871 | 831 | Phe-8 to Lys-27, | AR061: 1, AR089: 1 | | |
| | | | | | | Ser-79 to Ser-87, | L0774: 2 and H0144: | | |
| | | | | | | Cys-102 to Val-116. | 2. | | |
| | | 974353 | 523 | 362-871 | 1121 | Phe-8 to Lys-27, | | | |
| | | | | | | Ser-79 to Ser-87, | | | |
| | | | | | | Cys-102 to Val-116. | | | |
| 224 | HSDJI44 | 1154068 | 234 | 218-1921 | 832 | Ala-324 to Phe-332, | AR061: 0, AR089: 0 | | |
| | | | | | | Arg-336 to Thr-343, | S0045: 6, H0255: 5, | | |
| | | | | | | Pro-373 to Arg-384, | S0028: 4, S0031: 2, | | |
| | | | | | | Lys-424 to Asp-431. | S0260: 2, H0341: 1, | | |
| | | | | | | | S0278: 1, H0333: 1, | | |
| | | | | | | | H0250: 1, S0050: 1, | | |
| | | | | | | | H0271: 1, H0100: 1, | | |
| | | | | | | | S0216: 1, S0044: 1 and | | |
| | | | | | | | S0390: 1. | | |
| | | 974784 | 524 | 210-1847 | 1122 | Ala-324 to Phe-332, | | | |
| | | | | | | Arg-336 to Thr-343, | | | |
| | | | | | | Pro-373 to Arg-384, | | | |
| | | | | | | Lys-424 to Asp-431. | | | |
| 225 | HFXDP53 | 1126294 | 235 | 1-435 | 833 | Gln-16 to Gly-25, | AR061: 3, AR089: 1 | | |
| | | | | | | Thr-32 to Gly-42, | S0001: 1 | | |
| | | | | | | Asn-46 to Asp-52. | | | |
| | | 578868 | 525 | 3-272 | 1123 | Lys-1 to Arg-7, | | | |
| | | | | | | Phe-10 to Arg-19. | | | |
| 226 | HWADY66 | 734565 | 236 | 1-186 | 834 | | AR061: 1, AR089: 1 | | |
| | | | | | | | H0581: 1, H0494: 1, | | |
| | | | | | | | H0521: 1, H0444: 1, | | |
| | | | | | | | H0543: 1 and L0465: 1. | | |
| 227 | HLDBC63 | 1144557 | 237 | 3-662 | 835 | Phe-61 to Thr-68, | AR061: 10, AR089: 4 | | |
| | | | | | | Arg-70 to Ser-76, | L0754: 4, H0616: 1 | | |
| | | | | | | Gln-88 to Arg-93, | and H0509: 1. | | |
| | | | | | | Pro-145 to Gln-157, | | | |
| | | | | | | Glu-164 to Ser-171, | | | |
| | | | | | | Gly-215 to Thr-220. | | | |
| | | 745061 | 526 | 3-416 | 1124 | Phe-61 to Thr-68, | | | |
| | | | | | | Arg-70 to Ser-76, | | | |
| | | | | | | Gln-88 to Arg-93. | | | |
| 228 | HFIVB68 | 978211 | 238 | 3-665 | 836 | Arg-20 to Thr-27, | AR061: 1, AR089: 1 | | |
| | | | | | | Leu-40 to Gly-45, | H0013: 2, S0468: 1, | | |
| | | | | | | His-57 to Lys-74, | S0046: 1, H0592: 1, | | |
| | | | | | | Thr-97 to Ser-112, | H0266: 1, S3014: 1, | | |
| | | | | | | Asp-150 to Ser-155, | S0028: 1 and S0196: 1. | | |
| | | | | | | Leu-177 to Asp-182. | | | |
| | | 752981 | 527 | 82-663 | 1125 | Thr-33 to Lys-47, | | | |
| | | | | | | Thr-70 to Ser-85, | | | |
| | | | | | | Asp-123 to Ser-128, | | | |
| | | | | | | Leu-150 to Asp-155. | | | |
| 229 | HTLAC56 | 1181355 | 239 | 3-698 | 837 | | AR061: 25, AR089: 15 | | |
| | | | | | | | L0783: 3, S0007: 2, | | |
| | | | | | | | L0782: 2, H0539: 2, | | |
| | | | | | | | L0747: 2, H0333: 1, | | |
| | | | | | | | H0253: 1, H0052: 1, | | |
| | | | | | | | H0546: 1, T0006: 1, | | |
| | | | | | | | H0135: 1, L0770: 1, | | |
| | | | | | | | L0769: 1, L0776: 1, | | |
| | | | | | | | L0745: 1, L0777: 1 and | | |
| | | | | | | | L0753: 1. | | |
| | | 753093 | 528 | 3-422 | 1126 | | | | |
| 230 | HSSAD41 | 753094 | 240 | 3-428 | 838 | | L0783: 3, S0007: 2, | | |
| | | | | | | | L0782: 2, H0539: 2, | | |
| | | | | | | | L0747: 2, H0333: 1, | | |
| | | | | | | | H0253: 1, H0052: 1, | | |
| | | | | | | | H0546: 1, T0006: 1, | | |
| | | | | | | | H0135: 1, L0770: 1, | | |
| | | | | | | | L0769: 1, L0776: 1, | | |
| | | | | | | | L0745: 1, L0777: 1 and | | |
| | | | | | | | L0753: 1. | | |
| 231 | HCFMT57 | 1218436 | 241 | 3-1115 | 839 | Ser-4 to Arg-15, | AR061: 0, AR089: 0 | | |
| | | | | | | Glu-20 to Arg-62, | L0157: 2, H0620: 2, | | |
| | | | | | | Pro-107 to Gly-112, | L0666: 2, S0001: 1, | | |
| | | | | | | Gly-128 to Gly-134, | L0717: 1, H0549: 1, | | |
| | | | | | | Gln-137 to Arg-143, | S0222: 1, H0581: 1, | | |
| | | | | | | Ala-191 to Ala-212, | H0194: 1, H0015: 1, | | |
| | | | | | | Tyr-239 to Asn-247, | H0399: 1, H0271: 1, | | |
| | | | | | | Leu-300 to Pro-328, | H0688: 1, H0428: 1, | | |
| | | | | | | Pro-337 to Lys-350, | H0124: 1, L0637: 1, | | |
| | | | | | | Ser-356 to Leu-361, | H0672: 1, L0439: 1, | | |
| | | | | | | Gly-366 to Glu-371. | L0750: 1 and H0423: 1. | | |
| | | 765375 | 529 | 380-3 | 1127 | Glu-5 to Arg-15, | | | |
| | | | | | | Glu-20 to Arg-62. | | | |
| 232 | HDAAV61 | 1188787 | 242 | 1-1332 | 840 | Asp-34 to Asp-49, | AR089: 25, AR061: 11 | | |
| | | | | | | Gly-276 to Ala-286, | L0601: 5, H0266: 4, | | |
| | | | | | | Ile-298 to Tyr-303, | S0222: 3, H0265: 2, | | |
| | | | | | | Leu-390 to Arg-395. | H0556: 2, H0575: 2, | | |
| | | | | | | | H0052: 2, H0271: 2, | | |
| | | | | | | | S0114: 1, S0134: 1, | | |
| | | | | | | | S0420: 1, H0393: 1, | | |
| | | | | | | | H0550: 1, H0497: 1, | | |
| | | | | | | | H0318: 1, H0581: 1, | | |
| | | | | | | | H0251: 1, T0115: 1, | | |
| | | | | | | | H0014: 1, H0286: 1, | | |
| | | | | | | | H0494: 1, H0561: 1, | | |
| | | | | | | | L0766: 1, L0657: 1, | | |
| | | | | | | | H0698: 1, H0684: 1, | | |
| | | | | | | | S0330: 1, H0521: 1, | | |
| | | | | | | | S3014: 1, L0777: 1, | | |
| | | | | | | | S0260: 1, L0591: 1, | | |
| | | | | | | | L0594: 1 and H0543: 1. | | |
| | | 810305 | 530 | 2-343 | 1128 | Asp-90 to Lys-105. | | | |
| 233 | HDPKD75 | 1096253 | 243 | 2-637 | 841 | Gly-2 to Asp-11, | AR089: 4, AR061: 0 | | |
| | | | | | | Ala-23 to Asn-30, | H0581: 1, H0494: 1, | | |
| | | | | | | Phe-48 to Gly-56, | H0521: 1, H0543: 1 and | | |
| | | | | | | Glu-99 to His-105, | L0465: 1. | | |
| | | | | | | Glu-187 to Glu-192. | | | |
| | | 810824 | 531 | 2-445 | 1129 | Ala-13 to Asn-20, | | | |
| | | | | | | Phe-38 to Gly-46, | | | |
| | | | | | | Glu-89 to His-95. | | | |
| 234 | HTEON29 | 1126312 | 244 | 1-516 | 842 | Pro-27 to Ala-35, | AR061: 6, AR089: 3 | | |
| | | | | | | Ser-138 to Asn-144. | H0038: 4, L0758: 3, | | |
| | | | | | | | H0616: 2, L0794: 2, | | |
| | | | | | | | L0747: 2, L0803: 1, | | |
| | | | | | | | L0789: 1 and L0590: 1. | | |
| | | 815852 | 532 | 2-520 | 1130 | Pro-27 to Ala-35. | | | |
| 235 | HSKAC24 | 1121800 | 245 | 1-480 | 843 | Ala-3 to Arg-20, | AR061: 2, AR089: 1 | | |
| | | | | | | Ser-33 to Asp-39, | H0370: 2, S0002: 1, | | |
| | | | | | | Leu-70 to Ser-76, | S0428: 1 and S0027: 1. | | |
| | | | | | | Pro-117 to Tyr-122. | | | |
| | | 823869 | 533 | 98-481 | 1131 | Ser-1 to Asp-7, | | | |
| | | | | | | Leu-38 to Ser-44, | | | |
| | | | | | | Pro-85 to Tyr-90. | | | |
| 236 | HTJAA71 | 1216498 | 246 | 25-1029 | 844 | Arg-32 to Asn-39, | AR089: 5, AR061: 4 | | |
| | | | | | | Leu-76 to Gly-82, | S0328: 5, H0264: 4, | | |
| | | | | | | Cys-112 to Ser-119, | L0549: 3, S0306: 2, | | |
| | | | | | | Gly-129 to Gly-135, | H0379: 1, H0487: 1, | | |
| | | | | | | Ala-141 to Val-167, | S0448: 1, S0450: 1, | | |
| | | | | | | Ser-181 to Ile-194, | L0648: 1, L0551: 1 and | | |
| | | | | | | Ser-201 to Gly-239, | S0330: 1. | | |
| | | | | | | Ser-245 to Gln-250, | | | |
| | | | | | | Thr-256 to Thr-293, | | | |
| | | | | | | Ala-306 to Asp-335. | | | |
| | | 846682 | 534 | 23-334 | 1132 | Arg-32 to Asn-39. | | | |
| 237 | HTEKS20 | 1124378 | 247 | 2-562 | 845 | Pro-7 to Arg-12, | AR061: 2, AR089: 1 | | |
| | | | | | | Phe-32 to Ile-37, | L0758: 14, H0038: 5, | | |
| | | | | | | Arg-39 to Lys-45, | L0779: 4, L0794: 2 and | | |
| | | | | | | Leu-47 to Gly-53, | H0616: 1. | | |
| | | | | | | Lys-102 to Lys-108, | | | |
| | | | | | | Asp-117 to Gly-122. | | | |
| | | 846714 | 535 | 3-569 | 1133 | Pro-9 to Arg-14, | | | |
| | | | | | | Phe-34 to Ile-39, | | | |
| | | | | | | Arg-41 to Lys-47, | | | |
| | | | | | | Leu-49 to Gly-55, | | | |
| | | | | | | Lys-104 to Lys-110, | | | |
| | | | | | | Asp-119 to Gly-124. | | | |
| 238 | HE9TK49 | 1125192 | 248 | 3-863 | 846 | Glu-134 to Glu-144, | AR061: 3, AR089: 1 | | |
| | | | | | | Gln-151 to Arg-161, | H0144: 2 and S0053: 1. | | |
| | | | | | | Arg-167 to Gly-172, | | | |
| | | | | | | Tyr-183 to Asn-188, | | | |
| | | | | | | Asn-193 to Phe-209, | | | |
| | | | | | | Asp-261 to Trp-272. | | | |
| | | 856343 | 536 | 2-328 | 1134 | | | | |
| 239 | HCHAT01 | 1202275 | 249 | 2-2269 | 847 | Glu-75 to Glu-86, | AR089: 1, AR061: 0 | | |
| | | | | | | Leu-176 to Gln-181, | L0439: 12, L0748: 11, | | |
| | | | | | | Ser-276 to Ala-282, | L0751: 11, L0769: 7, | | |
| | | | | | | Leu-320 to Lys-325, | H0046: 6, L0756: 6, | | |
| | | | | | | Met-366 to Ser-373, | L0775: 5, L0666: 5, | | |
| | | | | | | Leu-414 to Asp-419, | L0747: 5, L0770: 4, | | |
| | | | | | | Thr-471 to His-506, | L0438: 4, L0740: 4, | | |
| | | | | | | Lys-513 to Ile-522, | L0777: 4, H0617: 3, | | |
| | | | | | | Pro-526 to Gln-532, | L0662: 3, L0774: 3, | | |
| | | | | | | Asp-547 to Asp-552, | L0776: 3, H0521: 3, | | |
| | | | | | | Ala-576 to Cys-585, | S0037: 3, L0749: 3, | | |
| | | | | | | Glu-588 to His-598, | L0731: 3, L0757: 3, | | |
| | | | | | | Gly-637 to Pro-645, | L0758: 3, S0212: 2, | | |
| | | | | | | Leu-649 to Asp-657, | S0222: 2, H0586: 2, | | |
| | | | | | | Ile-733 to Phe-743, | H0587: 2, H0333: 2, | | |
| | | | | | | Ala-746 to Gly-753. | H0156: 2, H0052: 2, | | |
| | | | | | | | S0388: 2, H0290: 2, | | |
| | | | | | | | L0640: 2, L0521: 2, | | |
| | | | | | | | L0766: 2, L0375: 2, | | |
| | | | | | | | L0659: 2, L0783: 2, | | |
| | | | | | | | H0144: 2, H0539: 2, | | |
| | | | | | | | L0755: 2, H0445: 2, | | |
| | | | | | | | L0596: 2, L0599: 2, | | |
| | | | | | | | H0149: 1, S0342: 1, | | |
| | | | | | | | H0294: 1, S0114: 1, | | |
| | | | | | | | H0484: 1, H0483: 1, | | |
| | | | | | | | H0664: 1, H0638: 1, | | |
| | | | | | | | S0418: 1, S0420: 1, | | |
| | | | | | | | L0005: 1, S0046: 1, | | |
| | | | | | | | S0300: 1, H0549: 1, | | |
| | | | | | | | H0550: 1, H0370: 1, | | |
| | | | | | | | H0497: 1, H0331: 1, | | |
| | | | | | | | H0486: 1, H0575: 1, | | |
| | | | | | | | S0010: 1, H0434: 1, | | |
| | | | | | | | H0327: 1, H0457: 1, | | |
| | | | | | | | H0041: 1, H0081: 1, | | |
| | | | | | | | H0620: 1, H0024: 1, | | |
| | | | | | | | H0057: 1, H0051: 1, | | |
| | | | | | | | H0083: 1, H0266: 1, | | |
| | | | | | | | H0188: 1, S0250: 1, | | |
| | | | | | | | H0688: 1, H0644: 1, | | |
| | | | | | | | H0674: 1, S0366: 1, | | |
| | | | | | | | H0087: 1, H0116: 1, | | |
| | | | | | | | H0488: 1, H0494: 1, | | |
| | | | | | | | H0131: 1, S0150: 1, | | |
| | | | | | | | H0633: 1, H0649: 1, | | |
| | | | | | | | H0652: 1, L0369: 1, | | |
| | | | | | | | L0638: 1, L0646: 1, | | |
| | | | | | | | L0641: 1, L0771: 1, | | |
| | | | | | | | L0773: 1, L0653: 1, | | |
| | | | | | | | L0658: 1, L0809: 1, | | |
| | | | | | | | L0789: 1, L0663: 1, | | |
| | | | | | | | L0664: 1, H0693: 1, | | |
| | | | | | | | H0520: 1, S0126: 1, | | |
| | | | | | | | H0682: 1, H0659: 1, | | |
| | | | | | | | S0330: 1, H0696: 1, | | |
| | | | | | | | S0174: 1, H0555: 1, | | |
| | | | | | | | S3012: 1, S0028: 1, | | |
| | | | | | | | L0742: 1, L0744: 1, | | |
| | | | | | | | L0745: 1, L0750: 1, | | |
| | | | | | | | L0786: 1, L0779: 1, | | |
| | | | | | | | L0752: 1, S0434: 1, | | |
| | | | | | | | L0366: 1, H0542: 1, | | |
| | | | | | | | H0423: 1 and H0352: 1. | | |
| | | 867209 | 537 | 771-1556 | 1135 | Ser-20 to Ala-26, | | | |
| | | | | | | Leu-64 to Lys-69, | | | |
| | | | | | | Met-110 to Ser-117, | | | |
| | | | | | | Leu-158 to Asp-163. | | | |
| 240 | HCEEN06 | 1150867 | 250 | 128-664 | 848 | Pro-7 to Pro-14, | AR089: 6, AR061: 3 | | |
| | | | | | | Asp-70 to Arg-80, | L0666: 6, L0761: 4, | | |
| | | | | | | Asp-145 to Gln-152. | H0486: 3, L0794: 3, | | |
| | | | | | | | L0659: 3, H0255: 2, | | |
| | | | | | | | S0358: 2, H0052: 2, | | |
| | | | | | | | L0809: 2, L0743: 2, | | |
| | | | | | | | L0759: 2, H0692: 1, | | |
| | | | | | | | S0116: 1, H0581: 1, | | |
| | | | | | | | H0597: 1, L0055: 1, | | |
| | | | | | | | H0087: 1, L0763: 1, | | |
| | | | | | | | L0800: 1, L0644: 1, | | |
| | | | | | | | L0764: 1, L0766: 1, | | |
| | | | | | | | L0375: 1, L0655: 1, | | |
| | | | | | | | L0788: 1, L0663: 1, | | |
| | | | | | | | S0310: 1, H0672: 1, | | |
| | | | | | | | S0328: 1, H0539: 1 and | | |
| | | | | | | | H0436: 1. | | |
| | | 878658 | 538 | 2-619 | 1136 | Ser-1 to Ala-10, | | | |
| | | | | | | Cys-23 to Ala-29. | | | |
| 241 | HDPKI83 | 883382 | 251 | 101-673 | 849 | Pro-19 to Lys-29, | AR061: 3, AR089: 3 | | |
| | | | | | | His-38 to Phe-45, | H0521: 7, H0580: 5, | | |
| | | | | | | Ile-52 to Gln-66, | L0665: 4, H0457: 3, | | |
| | | | | | | Glu-123 to Glu-138. | L0766: 3, L0745: 3, | | |
| | | | | | | | L0761: 2, L0806: 2, | | |
| | | | | | | | L0789: 2, L0750: 2, | | |
| | | | | | | | H0542: 2, H0650: 1, | | |
| | | | | | | | H0656: 1, H0581: 1, | | |
| | | | | | | | H0271: 1, H0553: 1, | | |
| | | | | | | | H0413: 1, H0641: 1, | | |
| | | | | | | | S0002: 1, L0774: 1, | | |
| | | | | | | | H0660: 1, H0555: 1, | | |
| | | | | | | | L0753: 1 and H0423: 1. | | |
| 242 | HSPBQ12 | 1152258 | 252 | 1-588 | 850 | His-4 to Gly-21, | AR089: 2, AR061: 1 | | |
| | | | | | | Thr-55 to Ser-66, | L0766: 19, L0439: 9, | | |
| | | | | | | Pro-118 to Gly-130, | L0803: 7, L0740: 7, | | |
| | | | | | | Thr-168 to Ser-174. | L0752: 7, L0770: 5, | | |
| | | | | | | | L0659: 5, L0731: 5, | | |
| | | | | | | | L0805: 4, L0777: 4, | | |
| | | | | | | | H0657: 3, H0373: 3, | | |
| | | | | | | | L0804: 3, S0152: 3, | | |
| | | | | | | | L0748: 3, L0749: 3, | | |
| | | | | | | | L0779: 3, H0650: 2, | | |
| | | | | | | | L0471: 2, S6028: 2, | | |
| | | | | | | | H0032: 2, L0783: 2, | | |
| | | | | | | | L0438: 2, H0521: 2, | | |
| | | | | | | | H0478: 2, L0744: 2, | | |
| | | | | | | | L0747: 2, L0750: 2, | | |
| | | | | | | | L0485: 2, S0424: 2, | | |
| | | | | | | | S0134: 1, S0354: 1, | | |
| | | | | | | | S0358: 1, H0580: 1, | | |
| | | | | | | | S0222: 1, H0013: 1, | | |
| | | | | | | | L0021: 1, H0575: 1, | | |
| | | | | | | | H0050: 1, H0014: 1, | | |
| | | | | | | | H0051: 1, H0031: 1, | | |
| | | | | | | | H0553: 1, H0165: 1, | | |
| | | | | | | | H0551: 1, H0509: 1, | | |
| | | | | | | | H0132: 1, H0652: 1, | | |
| | | | | | | | S0002: 1, H0529: 1, | | |
| | | | | | | | L0763: 1, L0772: 1, | | |
| | | | | | | | L0372: 1, L0771: 1, | | |
| | | | | | | | L0521: 1, L0662: 1, | | |
| | | | | | | | L0768: 1, L0386: 1, | | |
| | | | | | | | L0388: 1, L0774: 1, | | |
| | | | | | | | L0775: 1, L0655: 1, | | |
| | | | | | | | L0782: 1, L0809: 1, | | |
| | | | | | | | L0787: 1, L0789: 1, | | |
| | | | | | | | L0663: 1, L0664: 1, | | |
| | | | | | | | H0144: 1, L0352: 1, | | |
| | | | | | | | H0520: 1, H0435: 1, | | |
| | | | | | | | H0659: 1, H0658: 1, | | |
| | | | | | | | H0648: 1, H0672: 1, | | |
| | | | | | | | S0378: 1, S0380: 1, | | |
| | | | | | | | S0044: 1, L0780: 1, | | |
| | | | | | | | L0757: 1, L0758: 1 and | | |
| | | | | | | | H0543: 1. | | |
| | | 884004 | 539 | 91-1287 | 1137 | | | | |
| 243 | HPCID78 | 886915 | 253 | 1-429 | 851 | Gly-1 to Cys-7. | AR054: 2, AR051: 1, | | |
| | | | | | | | AR089: 1, AR061: 0 | | |
| | | | | | | | H0642: 1 | | |
| 244 | HDTKQ14 | 886936 | 254 | 1-555 | 852 | Ser-60 to Thr-71, | AR054: 60, AR051: | | |
| | | | | | | Thr-82 to Leu-94, | 40, AR050: 36, AR089: | | |
| | | | | | | Gln-113 to Asp-123, | 5, AR061: 2 | | |
| | | | | | | Val-125 to Tyr-133, | H0521: 4, H0486: 2, | | |
| | | | | | | Leu-144 to Gly-149. | S0002: 2, L0770: 2, | | |
| | | | | | | | L0769: 2, L0766: 2, | | |
| | | | | | | | L0518: 2, L0783: 2, | | |
| | | | | | | | L0777: 2, L0731: 2, | | |
| | | | | | | | H0422: 2, H0556: 1, | | |
| | | | | | | | H0583: 1, H0650: 1, | | |
| | | | | | | | H0657: 1, H0179: 1, | | |
| | | | | | | | L0055: 1, H0488: 1, | | |
| | | | | | | | S0426: 1, L0662: 1, | | |
| | | | | | | | L0775: 1, L0655: 1, | | |
| | | | | | | | L0665: 1, S0053: 1, | | |
| | | | | | | | H0659: 1, L0754: 1, | | |
| | | | | | | | L0779: 1, L0759: 1 and | | |
| | | | | | | | H0543: 1. | | |
| 245 | HRACK83 | 888037 | 255 | 1-471 | 853 | Gln-15 to Gln-21. | AR089: 3, AR061: 2 | | |
| | | | | | | | L0803: 4, L0758: 3, | | |
| | | | | | | | S0212: 2, S0358: 2, | | |
| | | | | | | | H0038: 2, L0770: 2, | | |
| | | | | | | | L0767: 2, L0766: 2, | | |
| | | | | | | | L0748: 2, L0751: 2, | | |
| | | | | | | | L0747: 2, L0759: 2, | | |
| | | | | | | | L0588: 2, L0599: 2, | | |
| | | | | | | | H0411: 1, H0392: 1, | | |
| | | | | | | | H0333: 1, L0021: 1, | | |
| | | | | | | | H0118: 1, T0115: 1, | | |
| | | | | | | | L0471: 1, L0163: 1, | | |
| | | | | | | | H0633: 1, L0769: 1, | | |
| | | | | | | | L0764: 1, L0775: 1, | | |
| | | | | | | | L0376: 1, L0806: 1, | | |
| | | | | | | | L0805: 1, L0807: 1, | | |
| | | | | | | | L0787: 1, H0547: 1, | | |
| | | | | | | | S0122: 1, H0555: 1, | | |
| | | | | | | | H0478: 1, L0744: 1, | | |
| | | | | | | | L0740: 1, L0749: 1, | | |
| | | | | | | | L0750: 1, L0755: 1 and | | |
| | | | | | | | L0595: 1. | | |
| 246 | HSIAO78 | 1156438 | 256 | 2-631 | 854 | Met-15 to Ser-20, | AR089: 1, AR061: 0 | | |
| | | | | | | Asp-27 to Phe-37, | S0354: 3, S0358: 3, | | |
| | | | | | | Asp-53 to Tyr-59, | H0587: 3, L0764: 3, | | |
| | | | | | | Pro-86 to Asp-93, | L0803: 3, L0758: 3, | | |
| | | | | | | Pro-106 to Lys-129, | H0036: 2, L0794: 2, | | |
| | | | | | | Leu-139 to Ser-146, | L0809: 2, S0374: 2, | | |
| | | | | | | Thr-174 to Asp-183. | S0376: 1, S0444: 1, | | |
| | | | | | | | S0408: 1, H0231: 1, | | |
| | | | | | | | L0783: 1, L0777: 1 and | | |
| | | | | | | | L0759: 1. | | |
| | | 889498 | 540 | 2-622 | 1138 | Asp-24 to Phe-34, | | | |
| | | | | | | Asp-50 to Tyr-56, | | | |
| | | | | | | Pro-83 to Asp-90, | | | |
| | | | | | | Pro-103 to Lys-126, | | | |
| | | | | | | Leu-136 to Ser-143, | | | |
| | | | | | | Thr-171 to Asp-180. | | | |
| 247 | HWAGS73 | 894404 | 257 | 1-339 | 855 | Val-14 to Lys-21, | AR089: 2, AR061: 2 | | |
| | | | | | | Gln-41 to Trp-46, | H0581: 3, H0622: 3, | | |
| | | | | | | Ala-98 to Pro-103. | H0575: 2, H0090: 2, | | |
| | | | | | | | L0777: 2, L0757: 2, | | |
| | | | | | | | S0114: 1, H0650: 1, | | |
| | | | | | | | H0255: 1, S0360: 1, | | |
| | | | | | | | S0278: 1, H0486: 1, | | |
| | | | | | | | H0318: 1, H0046: 1, | | |
| | | | | | | | H0457: 1, H0039: 1, | | |
| | | | | | | | H0553: 1, L0763: 1, | | |
| | | | | | | | L0761: 1, L0764: 1, | | |
| | | | | | | | L0789: 1, H0144: 1, | | |
| | | | | | | | S0374: 1, S0310: 1, | | |
| | | | | | | | H0555: 1, L0758: 1, | | |
| | | | | | | | H0445: 1 and S0276: 1. | | |
| 248 | HCMSL08 | 898203 | 258 | 1-1221 | 856 | Gly-1 to Thr-10, | AR051: 86, AR054: | | 104770, |
| | | | | | | Ala-14 to Gly-19, | 73, AR050: 67, AR089: | | 107670, |
| | | | | | | Pro-52 to Val-57, | 10, AR061: 5 | | 110700, |
| | | | | | | Pro-85 to Gln-95, | H0706: 8, S0366: 5, | | 135940, |
| | | | | | | Lys-198 to His-204, | S0364: 4, L0485: 4, | | 145001, |
| | | | | | | Pro-254 to Glu-260, | L0604; 4, L0777: 3, | | 146790, |
| | | | | | | Glu-269 to Ser-282, | L0623: 2, S0362: 2, | | 152445, |
| | | | | | | Glu-302 to Gly-307, | H0373: 2, L0520: 2, | | 152445, |
| | | | | | | Asp-320 to Asp-326, | L0747: 2, H0624: 1, | | 159001, |
| | | | | | | Asp-373 to Ser-380, | H0619: 1, H0550: 1, | | 174000, |
| | | | | | | Ile-396 to Asp-407. | H0196: 1, L0646: 1, | | 179755, |
| | | | | | | | L0809: 1, H0693: 1, | | 182860, |
| | | | | | | | S0328: 1 and H0214: 1. | | 182860, |
| | | | | | | | | | 182860, |
| | | | | | | | | | 191315, |
| | | | | | | | | | 230800, |
| | | | | | | | | | 230800, |
| | | | | | | | | | 266200, |
| | | | | | | | | | 600897, |
| | | | | | | | | | 601105, |
| | | | | | | | | | 601412, |
| | | | | | | | | | 601652, |
| | | | | | | | | | 602491 |
| | | 959176 | 541 | 1372-569 | 1139 | Lys-59 to His-65, | | | |
| | | | | | | Pro-115 to Glu-121, | | | |
| | | | | | | Glu-130 to Ser-143, | | | |
| | | | | | | Glu-163 to Gly-168, | | | |
| | | | | | | Asp-181 to Asp-187, | | | |
| | | | | | | Asp-234 to Ser-241, | | | |
| | | | | | | Ile-257 to Asp-268. | | | |
| 249 | HLWFN63 | 1101533 | 259 | 404-2566 | 857 | Thr-7 to Phe-29, | AR051: 11, AR050: 9, | | |
| | | | | | | Thr-37 to Lys-52, | AR054: 5, AR089: 0, | | |
| | | | | | | Glu-89 to Val-112. | AR061: 0 | | |
| | | | | | | | H0031: 5, S0222: 4, | | |
| | | | | | | | S0028: 4, H0662: 3, | | |
| | | | | | | | L0748: 3, S0260: 3, | | |
| | | | | | | | S0276: 3, S0282: 2, | | |
| | | | | | | | S0360: 2, S0046: 2, | | |
| | | | | | | | H0575: 2, H0196: 2, | | |
| | | | | | | | S0036: 2, H0268: 2, | | |
| | | | | | | | L0662: 2, S0027: 2, | | |
| | | | | | | | L0754: 2, L0747: 2, | | |
| | | | | | | | L0749: 2, L0756: 2, | | |
| | | | | | | | L0777: 2, L0604: 2, | | |
| | | | | | | | L0595: 2, H0171: 1, | | |
| | | | | | | | S0030: 1, S0029: 1, | | |
| | | | | | | | S0358: 1, H0619: 1, | | |
| | | | | | | | S0300: 1, L0717: 1, | | |
| | | | | | | | H0550: 1, H0441: 1, | | |
| | | | | | | | H0431: 1, H0392: 1, | | |
| | | | | | | | T0060: 1, S0010: 1, | | |
| | | | | | | | H0052: 1, H0309: 1, | | |
| | | | | | | | S6028: 1, S0250: 1, | | |
| | | | | | | | H0252: 1, H0553: 1, | | |
| | | | | | | | S0364: 1, S0366: 1, | | |
| | | | | | | | H0433: 1, H0269: 1, | | |
| | | | | | | | H0412: 1, L0372: 1, | | |
| | | | | | | | L0804: 1, L0789: 1, | | |
| | | | | | | | L0666: 1, L0663: 1, | | |
| | | | | | | | S0126: 1, S0044: 1, | | |
| | | | | | | | H0345: 1, S0390: 1, | | |
| | | | | | | | S0037: 1, S3014: 1, | | |
| | | | | | | | L0743: 1, L0439: 1, | | |
| | | | | | | | L0750: 1, L0779: 1, | | |
| | | | | | | | L0599: 1, L0593: 1, | | |
| | | | | | | | L0366: 1 and H0653: 1. | | |
| | | 908437 | 542 | 404-2566 | 1140 | Thr-7 to Phe-29, | | | |
| | | | | | | Thr-37 to Lys-52, | | | |
| | | | | | | Glu-89 to Val-112. | | | |
| 250 | HPWAY10 | 1128033 | 260 | 397-1167 | 858 | Gly-1 to Trp-7, | AR089: 1, AR061: 0 | | |
| | | | | | | Leu-11 to Phe-21, | H0341: 1, H0013: 1 | | |
| | | | | | | Glu-46 to His-52, | and S0044: 1. | | |
| | | | | | | Val-59 to Leu-73, | | | |
| | | | | | | Tyr-79 to Cys-91, | | | |
| | | | | | | His-111 toTyr-117, | | | |
| | | | | | | Ser-133 to Lys-149, | | | |
| | | | | | | His-167 to Tyr-173, | | | |
| | | | | | | His-195 to Tyr-201, | | | |
| | | | | | | His-251 to Lys-257. | | | |
| | | 908549 | 543 | 149-466 | 1141 | Cys-36 to Asn-43, | | | |
| | | | | | | Gln-74 to Trp-79. | | | |
| 251 | HOUDH19 | 1153909 | 261 | 3-404 | 859 | Ser-2 to Gln-12, | AR089: 1, AR061: 0 | | |
| | | | | | | Cys-14 to Met-19, | S0040: 1, H0250: 1, | | |
| | | | | | | Ser-34 to Leu-41, | T0048: 1, L0761: 1, | | |
| | | | | | | Pro-43 to Leu-48, | L0764: 1, L0783: 1, | | |
| | | | | | | Glu-89 to Asp-111, | L0809: 1, L0789: 1 and | | |
| | | | | | | Ile-125 to Lys-134. | L0757: 1. | | |
| | | 908588 | 544 | 52-573 | 1142 | Thr-8 to Gln-19, | | | |
| | | | | | | Lys-26 to Glu-33, | | | |
| | | | | | | Lys-41 to Ile-50. | | | |
| 252 | HDPFF24 | 1194719 | 262 | 124-1317 | 860 | Ser-38 to Tyr-44, | AR089: 4, AR061: 1 | | |
| | | | | | | Glu-72 to Pro-77, | H0171: 5, S0026: 3, | | |
| | | | | | | Asp-91 to Pro-113, | S0400: 2, L0471: 2, | | |
| | | | | | | Gln-124 to Asn-134, | H0031: 2, H0553: 2, | | |
| | | | | | | Ser-182 to Ile-190, | H0547: 2, H0521: 2, | | |
| | | | | | | Glu-215 to Gly-220, | L0759: 2, H0423: 2, | | |
| | | | | | | Leu-223 to Ser-229, | H0170: 1, H0583: 1, | | |
| | | | | | | Gln-243 to Ile-250, | H0656: 1, S0001: 1, | | |
| | | | | | | His-273 to His-290, | S0358: 1, S0360: 1, | | |
| | | | | | | His-301 to Lys-308, | H0244: 1, H0349: 1, | | |
| | | | | | | Thr-323 to Glu-336, | H0590: 1, H0310: 1, | | |
| | | | | | | Met-338 to Ser-343, | H0014: 1, H0039: 1, | | |
| | | | | | | Thr-358 to Tyr-363, | S0366: 1, H0551: 1, | | |
| | | | | | | His-385 to Asn-398. | L0351: 1, H0509: 1, | | |
| | | | | | | | S0150: 1, L0369: 1, | | |
| | | | | | | | L0796: 1, L0773: 1, | | |
| | | | | | | | L0662: 1, L0766: 1, | | |
| | | | | | | | L0803: 1, L0635: 1, | | |
| | | | | | | | L0540: 1, H0519: 1, | | |
| | | | | | | | H0684: 1, H0660: 1, | | |
| | | | | | | | H0666: 1, S0044: 1, | | |
| | | | | | | | H0478: 1, H0479: 1, | | |
| | | | | | | | H0626: 1, L0748: 1, | | |
| | | | | | | | L0740: 1, L0777: 1, | | |
| | | | | | | | L0752: 1, L0755: 1 and | | |
| | | | | | | | H0543: 1. | | |
| | | 909232 | 545 | 104-460 | 1143 | | | | |
| 253 | HWLFH94 | 1152278 | 263 | 589-951 | 861 | Glu-20 to Gly-25, | AR089: 5, AR061: 2 | | |
| | | | | | | Gln-36 to Ser-48, | S0358: 5, L0596: 3, | | |
| | | | | | | Ser-56 to Val-62. | L0771: 2, L0758: 2, | | |
| | | | | | | | S0354: 1, S0376: 1, | | |
| | | | | | | | T0109: 1, H0036: 1, | | |
| | | | | | | | H0590: 1, L0040: 1, | | |
| | | | | | | | H0038: 1, H0616: 1, | | |
| | | | | | | | L0646: 1, L0764: 1, | | |
| | | | | | | | L0768: 1, L0775: 1, | | |
| | | | | | | | L0659: 1 and S0404: 1. | | |
| | | 909682 | 546 | 134-535 | 1144 | Ser-25 to Ala-52, | | | |
| | | | | | | Phe-64 to Glu-71. | | | |
| 254 | HWMBM13 | 1152283 | 264 | 3-557 | 862 | Pro-17 to Ala-41, | AR089: 2, AR061: 2 | | |
| | | | | | | Phe-53 to Glu-60, | S0358: 6, L0794: 4, | | |
| | | | | | | Glu-84 to Gly-89, | L0758: 4, S0354: 3, | | |
| | | | | | | Gln-100 to Ser-112, | L0779: 3, L0596: 3, | | |
| | | | | | | Ser-120 to Val-126. | S0376: 2, H0036: 2, | | |
| | | | | | | | H0620: 2, H0063: 2, | | |
| | | | | | | | L0771: 2, L0803: 2, | | |
| | | | | | | | L0654: 2, L0659: 2, | | |
| | | | | | | | T0109: 1, H0013: 1, | | |
| | | | | | | | H0590: 1, H0052: 1, | | |
| | | | | | | | H0596: 1, T0110: 1, | | |
| | | | | | | | L0040: 1, H0090: 1, | | |
| | | | | | | | H0038: 1, H0040: 1, | | |
| | | | | | | | H0616: 1, H0429: 1, | | |
| | | | | | | | H0561: 1, L0646: 1, | | |
| | | | | | | | L0764: 1, L0768: 1, | | |
| | | | | | | | L0766: 1, L0775: 1, | | |
| | | | | | | | L0790: 1, L0792: 1, | | |
| | | | | | | | S0404: 1, S0390: 1, | | |
| | | | | | | | L0777: 1, L0755: 1, | | |
| | | | | | | | L0592: 1 and S0458: 1. | | |
| | | 909683 | 547 | 3-539 | 1145 | Pro-11 to Ala-35, | | | |
| | | | | | | Phe-47 to Glu-54, | | | |
| | | | | | | Glu-78 to Gly-83, | | | |
| | | | | | | Gln-94 to Ser-106, | | | |
| | | | | | | Ser-114 to Val-120. | | | |
| 255 | HFIUE75 | 1172525 | 265 | 79-1290 | 863 | His-22 to Ile-35, | AR089: 1, AR061: 1 | | |
| | | | | | | Phe-39 to Glu-47, | L0748: 5, S0242: 3, | | |
| | | | | | | Asp-65 to Ser-76, | H0615: 2, S0376: 1, | | |
| | | | | | | Ser-82 to Lys-89, | S0360: 1, L0717: 1, | | |
| | | | | | | Met-93 to Ser-98. | L0641: 1, L0766: 1, | | |
| | | | | | | | L0664: 1, H0478: 1, | | |
| | | | | | | | L0593: 1 and S0196: 1. | | |
| | | 909758 | 548 | 2-775 | 1146 | Cys-1 to Val-10, | | | |
| | | | | | | Ala-14 to Met-22. | | | |
| 256 | HNTCP13 | 1182313 | 266 | 1-957 | 864 | Leu-6 to Tyr-15, | AR061: 3, AR089: 2 | | |
| | | | | | | Ser-48 to Phe-53, | L0750: 4, H0519: 3, | | |
| | | | | | | Asn-66 to Ser-71, | L0666: 2, L0565: 2, | | |
| | | | | | | Asp-101 to Pro-111, | H0539: 2, L0742: 2, | | |
| | | | | | | Gln-116 to Glu-124, | L0744: 2, L0754: 2, | | |
| | | | | | | Arg-203 to Asp-212. | L0777: 2, L0759: 2, | | |
| | | | | | | | H0662: 1, S0045: 1, | | |
| | | | | | | | S0346: 1, H0251: 1, | | |
| | | | | | | | H0030: 1, H0628: 1, | | |
| | | | | | | | H0674: 1, H0529: 1, | | |
| | | | | | | | L0770: 1, L0764: 1, | | |
| | | | | | | | L0526: 1, L0783: 1, | | |
| | | | | | | | L0787: 1, H0547: 1, | | |
| | | | | | | | H0521: 1, H0696: 1, | | |
| | | | | | | | H0555: 1, L0747: 1, | | |
| | | | | | | | L0749: 1, L0786: 1, | | |
| | | | | | | | L0779: 1, L0780: 1, | | |
| | | | | | | | L0752: 1 and L0592: 1. | | |
| | | 909770 | 549 | 1-960 | 1147 | | | | |
| 257 | HBIBQ89 | 1175111 | 267 | 3-824 | 865 | Gly-35 to Asp-41, | AR089: 1, AR061: 0 | | |
| | | | | | | Phe-113 to Met-119, | L0438: 6, L0751: 6, | | |
| | | | | | | Pro-164 to Glu-170, | L0439: 5, L0770: 4, | | |
| | | | | | | Val-173 to Gly-178, | H0052: 2, H0620: 2, | | |
| | | | | | | Met-180 to Glu-190, | H0521: 2, L0756: 2, | | |
| | | | | | | Thr-192 to Gln-199, | L0731: 2, L0758: 2, | | |
| | | | | | | His-206 to Glu-211, | L0588: 2, H0556: 1, | | |
| | | | | | | Arg-244 to Ile-257. | S0282: 1, H0662: 1, | | |
| | | | | | | | H0402: 1, S0418: 1, | | |
| | | | | | | | T0008: 1, S0222: 1, | | |
| | | | | | | | H0392: 1, H0333: 1, | | |
| | | | | | | | L0021: 1, H0581: 1, | | |
| | | | | | | | S0049: 1, L0471: 1, | | |
| | | | | | | | H0266: 1, L0351: 1, | | |
| | | | | | | | L0772: 1, L0766: 1, | | |
| | | | | | | | L0776: 1, L0659: 1, | | |
| | | | | | | | L0792: 1, H0522: 1, | | |
| | | | | | | | S0027: 1, L0779: 1 and | | |
| | | | | | | | S0011: 1. | | |
| | | 909782 | 550 | 2-577 | 1148 | | | | |
| 258 | HWBEG18 | 1169125 | 268 | 439-161 | 866 | Leu-42 to Ile-47. | AR089: 82, AR061: 18 | | |
| | | | | | | | H0580: 1 | | |
| | | 909798 | 551 | 55-696 | 1149 | Trp-46 to Lys-51, | | | |
| | | | | | | Pro-109 to Asn-123, | | | |
| | | | | | | Phe-156 to Gly-165. | | | |
| 259 | HTAHB43 | 1221956 | 269 | 3-2174 | 867 | | AR089: 1, AR061: 0 | | |
| | | | | | | | H0046: 34, L0731: 5, | | |
| | | | | | | | L0534: 4, L0769: 4, | | |
| | | | | | | | H0521: 4, S0356: 3, | | |
| | | | | | | | L0800: 3, L0794: 3, | | |
| | | | | | | | L0439: 3, L0749: 3, | | |
| | | | | | | | L0752: 3, L0759: 3, | | |
| | | | | | | | L0562: 2, H0486: 2, | | |
| | | | | | | | L0803: 2, L0805: 2, | | |
| | | | | | | | L0809: 2, L0789: 2, | | |
| | | | | | | | L0744: 2, L0485: 2, | | |
| | | | | | | | H0556: 1, H0657: 1, | | |
| | | | | | | | H0637: 1, H0580: 1, | | |
| | | | | | | | H0208: 1, H0261: 1, | | |
| | | | | | | | H0609: 1, H0455: 1, | | |
| | | | | | | | H0600: 1, H0586: 1, | | |
| | | | | | | | H0331: 1, H0635: 1, | | |
| | | | | | | | H0618: 1, H0544: 1, | | |
| | | | | | | | H0009: 1, H0050: 1, | | |
| | | | | | | | H0620: 1, H0288: 1, | | |
| | | | | | | | S0312: 1, S0314: 1, | | |
| | | | | | | | H0252: 1, H0688: 1, | | |
| | | | | | | | H0644: 1, S0366: 1, | | |
| | | | | | | | H0135: 1, H0063: 1, | | |
| | | | | | | | H0087: 1, H0551: 1, | | |
| | | | | | | | H0264: 1, S0002: 1, | | |
| | | | | | | | L0639: 1, L0771: 1, | | |
| | | | | | | | L0648: 1, L0766: 1, | | |
| | | | | | | | L0650: 1, L0378: 1, | | |
| | | | | | | | L0655: 1, H0699: 1, | | |
| | | | | | | | H0660: 1, L0743: 1, | | |
| | | | | | | | L0750: 1, L0777: 1, | | |
| | | | | | | | L0758: 1, L0097: 1, | | |
| | | | | | | | S0194: 1 and H0543: 1. | | |
| | | 909845 | 552 | 18-914 | 1150 | Gln-8 to Glu-13. | | | |
| 260 | HSYBX32 | 909846 | 270 | 46-228 | 868 | | AR061: 0, AR089: 0 | 7q22- | 126650, |
| | | | | | | | H0046: 34, L0731: 5, | q31.1 | 126650, |
| | | | | | | | L0534: 4, L0769: 4, | | 150240, |
| | | | | | | | H0521: 4, S0356: 3, | | 154276, |
| | | | | | | | L0800: 3, L0794: 3, | | 173360, |
| | | | | | | | L0439: 3, L0749: 3, | | 173360, |
| | | | | | | | L0752: 3, L0759: 3, | | 180105, |
| | | | | | | | L0562: 2, H0486: 2, | | 222800, |
| | | | | | | | L0803: 2, L0805: 2, | | 246900, |
| | | | | | | | L0809: 2, L0789: 2, | | 602136, |
| | | | | | | | L0744: 2, L0485: 2, | | 602136, |
| | | | | | | | H0556: 1, H0657: 1, | | 602136, |
| | | | | | | | H0637: 1, H0580: 1, | | 602447 |
| | | | | | | | H0208: 1, H0261: 1, | | |
| | | | | | | | H0609: 1, H0455: 1, | | |
| | | | | | | | H0600: 1, H0586: 1, | | |
| | | | | | | | H0331: 1, H0635: 1, | | |
| | | | | | | | H0618: 1, H0544: 1, | | |
| | | | | | | | H0009: 1, H0050: 1, | | |
| | | | | | | | H0620: 1, H0288: 1, | | |
| | | | | | | | S0312: 1, S0314: 1, | | |
| | | | | | | | H0252: 1, H0688: 1, | | |
| | | | | | | | H0644: 1, S0366: 1, | | |
| | | | | | | | H0135: 1, H0063: 1, | | |
| | | | | | | | H0087: 1, H0551: 1, | | |
| | | | | | | | H0264: 1, S0002: 1, | | |
| | | | | | | | L0639: 1, L0771: 1, | | |
| | | | | | | | L0648: 1, L0766: 1, | | |
| | | | | | | | L0650: 1, L0378: 1, | | |
| | | | | | | | L0655: 1, H0699: 1, | | |
| | | | | | | | H0660: 1, L0743: 1, | | |
| | | | | | | | L0750: 1, L0777: 1, | | |
| | | | | | | | L0758: 1, L0097: 1, | | |
| | | | | | | | S0194: 1 and H0543: 1. | | |
| 261 | HCEHE35 | 1124531 | 271 | 2-550 | 869 | Arg-1 to Pro-15, | AR061: 8, AR089: 3 | | |
| | | | | | | Asn-17 to Leu-25, | S0222: 1, H0052: 1, | | |
| | | | | | | Glu-27 to Pro-36, | H0194: 1, H0290: 1 and | | |
| | | | | | | Pro-41 to Pro-55, | H0264: 1. | | |
| | | | | | | Glu-58 to Gln-79. | | | |
| | | 909937 | 553 | 3-392 | 1151 | Asn-6 to Pro-13. | | | |
| 262 | HFCBB56 | 1204971 | 272 | 112-753 | 870 | Thr-37 to Ser-42, | AR061: 1, AR089: 1 | | |
| | | | | | | Gln-48 to Pro-55, | H0009: 1 | | |
| | | | | | | Ser-75 to Ala-80, | | | |
| | | | | | | Ser-95 to Val-111, | | | |
| | | | | | | Gln-113 to Gly-124, | | | |
| | | | | | | Glu-153 to Gly-161, | | | |
| | | | | | | Tyr-188 to Asp-193. | | | |
| | | 910073 | 554 | 209-565 | 1152 | | | | |
| 263 | HAMFL82 | 910074 | 273 | 3-317 | 871 | Glu-20 to Val-26. | AR089: 9, AR061: 4 | | |
| | | | | | | | H0229: 1, H0590: 1, | | |
| | | | | | | | S0049: 1, H0014: 1, | | |
| | | | | | | | H0560: 1, L0439: 1 and | | |
| | | | | | | | H0543: 1. | | |
| 264 | HBXCM38 | 1174533 | 274 | 402-1349 | 872 | | AR061: 2, AR089: 1 | | |
| | | | | | | | L0439: 6, S0038: 3, | | |
| | | | | | | | L0803: 3, H0455: 2, | | |
| | | | | | | | L0769: 2, L0809: 2, | | |
| | | | | | | | L0741: 2, L0756: 2, | | |
| | | | | | | | S6024: 1, S0001: 1, | | |
| | | | | | | | H0663: 1, S0222: 1, | | |
| | | | | | | | H0441: 1, H0438: 1, | | |
| | | | | | | | H0036: 1, S0049: 1, | | |
| | | | | | | | H0309: 1, H0566: 1, | | |
| | | | | | | | H0024: 1, S0388: 1, | | |
| | | | | | | | S0051: 1, T0010: 1, | | |
| | | | | | | | H0059: 1, L0645: 1, | | |
| | | | | | | | L0774: 1, L0790: 1, | | |
| | | | | | | | L0663: 1, L0665: 1, | | |
| | | | | | | | H0345: 1, L0742: 1, | | |
| | | | | | | | L0748: 1, L0749: 1, | | |
| | | | | | | | H0707: 1, L0595: 1 and | | |
| | | | | | | | L0366: 1. | | |
| | | 910086 | 555 | 402-1535 | 1153 | Val-36 to Glu-43, | | | |
| | | | | | | Lys-66 to Glu-71. | | | |
| 265 | HLHCR16 | 910123 | 275 | 2-3418 | 873 | Pro-9 to Pro-15, | AR050: 9, AR061: 2, | | |
| | | | | | | Gly-49 to Trp-54, | AR054: 2, AR089: 2, | | |
| | | | | | | Ser-91 to Phe-96, | AR051: 2 | | |
| | | | | | | Thr-109 to Asp-115, | L0754: 14, L0777: 13, | | |
| | | | | | | Cys-124 to Ile-130, | H0553: 10, L0600: 7, | | |
| | | | | | | Cys-164 to Trp-169, | L0748: 6, L0803: 4, | | |
| | | | | | | Thr-193 to Asp-207, | L0749: 4, UNKWN: 4, | | |
| | | | | | | Thr-215 to Tyr-220, | H0624: 3, S0280: 3, | | |
| | | | | | | Thr-228 to Ser-240, | S0126: 3, L0747: 3, | | |
| | | | | | | Glu-269 to Ser-276, | S0282: 2, H0024: 2, | | |
| | | | | | | Glu-327 to Ala-334, | H0030: 2, H0031: 2, | | |
| | | | | | | Asn-376 to Asp-392, | H0040: 2, L0438: 2, | | |
| | | | | | | Gln-420 to Asn-428, | S0028: 2, L0743: 2, | | |
| | | | | | | Tyr-547 to Ser-566, | L0596: 2, L0603: 2, | | |
| | | | | | | Ala-616 to Gly-623, | S0212: 1, H0270: 1, | | |
| | | | | | | Pro-625 to Ser-631, | H0244: 1, H0427: 1, | | |
| | | | | | | Ser-647 to Val-653, | H0251: 1, H0309: 1, | | |
| | | | | | | Gly-676 to Pro-681, | S0338: 1, S0340: 1, | | |
| | | | | | | Tyr-720 to Glu-740, | S0250: 1, H0252: 1, | | |
| | | | | | | Ile-742 to Lys-748, | H0039: 1, L0143: 1, | | |
| | | | | | | Asp-792 to Cys-804, | H0038: 1, L0659: 1, | | |
| | | | | | | Leu-841 to Val-848, | L0565: 1, H0593: 1, | | |
| | | | | | | Gln-850 to Gly-857, | H0684: 1, H0518: 1, | | |
| | | | | | | Asp-879 to Gly-886, | S0390: 1, S0260: 1 and | | |
| | | | | | | His-906 to Trp-913, | H0506: 1. | | |
| | | | | | | Pro-968 to Thr-975, | | | |
| | | | | | | Gln-1051 to Ser-1057, | | | |
| | | | | | | Pro-1092 to Cys-1099, | | | |
| | | | | | | Lys-1113 to Cys-1120, | | | |
| | | | | | | Trp-1126 to Phe-1139. | | | |
| | | 965511 | 556 | 2-1492 | 1154 | Pro-9 to Pro-15, | | | |
| | | | | | | Gly-49 to Trp-54, | | | |
| | | | | | | Ser-91 to Phe-96, | | | |
| | | | | | | Thr-109 to Asp-115, | | | |
| | | | | | | Cys-124 to Ile-130, | | | |
| | | | | | | Cys-164 to Trp-169, | | | |
| | | | | | | Thr-193 to Asp-207, | | | |
| | | | | | | Thr-215 to Tyr-220, | | | |
| | | | | | | Thr-228 to Ser-240, | | | |
| | | | | | | Glu-269 to Ser-276, | | | |
| | | | | | | Glu-327 to Ala-334, | | | |
| | | | | | | Asn-376 to Asp-392, | | | |
| | | | | | | Gln-420 to Asn-428. | | | |
| 266 | HE6GF02 | 1153883 | 276 | 1-612 | 874 | Gln-13 to Ser-18, | AR061: 7, AR089: 4 | | |
| | | | | | | Glu-32 to Gly-37, | H0100: 1 and H0521: 1 | | |
| | | | | | | Ala-44 to Trp-49, | | | |
| | | | | | | Glu-56 to Val-61, | | | |
| | | | | | | Gln-68 to Lys-74, | | | |
| | | | | | | Ala-83 to Glu-88, | | | |
| | | | | | | Arg-111 to Gly-117, | | | |
| | | | | | | Tyr-123 to His-143, | | | |
| | | | | | | Ser-167 to Met-201. | | | |
| | | 911263 | 557 | 1-264 | 1155 | Gln-13 to Ser-18, | | | |
| | | | | | | Glu-32 to Gly-37, | | | |
| | | | | | | Ala-44 to Trp-49. | | | |
| 267 | HOUFT36 | 1162680 | 277 | 853-1563 | 875 | Thr-70 to Ala-83, | AR089: 2, AR061: 1 | | |
| | | | | | | Gly-105 to Asn-110, | L0794: 6, L0598: 2, | | |
| | | | | | | Ser-181 to Val-187. | L0803: 2, L0748: 2, | | |
| | | | | | | | S0040: 1, S0046: 1, | | |
| | | | | | | | H0431: 1, H0318: 1, | | |
| | | | | | | | L0766: 1, L0606: 1, | | |
| | | | | | | | L0749: 1, L0758: 1 and | | |
| | | | | | | | S0192: 1. | | |
| | | 911293 | 558 | 160-846 | 1156 | Lys-27 to Ile-43. | | | |
| 268 | HAGGF84 | 1197460 | 278 | 415-1530 | 876 | Arg-24 to Arg-30, | AR061: 3, AR089: 2 | | |
| | | | | | | Arg-39 to Tyr-44, | L0766: 18, L0748: 11, | | |
| | | | | | | Lys-78 to Glu-91, | L0439: 9, L0749: 8, | | |
| | | | | | | Val-215 to Lys-223. | L0438: 5, L0750: 5, | | |
| | | | | | | | L0777: 4, L0759: 4, | | |
| | | | | | | | H0441: 3, H0052: 3, | | |
| | | | | | | | L0637: 3, L0761: 3, | | |
| | | | | | | | L0740: 3, L0747: 3, | | |
| | | | | | | | L0103: 2, H0574: 2, | | |
| | | | | | | | H0156: 2, H0597: 2, | | |
| | | | | | | | S0250: 2, L0649: 2, | | |
| | | | | | | | L0803: 2, L0806: 2, | | |
| | | | | | | | L0792: 2, S3014: 2, | | |
| | | | | | | | L0757: 2, L0485: 2, | | |
| | | | | | | | L0599: 2, H0171: 1, | | |
| | | | | | | | S6024: 1, L0002: 1, | | |
| | | | | | | | H0657: 1, H0341: 1, | | |
| | | | | | | | S0358: 1, S0360: 1, | | |
| | | | | | | | S0132: 1, L0717: 1, | | |
| | | | | | | | H0632: 1, H0013: 1, | | |
| | | | | | | | H0599: 1, S0010: 1, | | |
| | | | | | | | S0346: 1, H0318: 1, | | |
| | | | | | | | H0251: 1, T0115: 1, | | |
| | | | | | | | H0544: 1, L0471: 1, | | |
| | | | | | | | H0014: 1, S0362: 1, | | |
| | | | | | | | H0083: 1, H0188: 1, | | |
| | | | | | | | H0428: 1, H0646: 1, | | |
| | | | | | | | H0538: 1, L0598: 1, | | |
| | | | | | | | L0762: 1, L0763: 1, | | |
| | | | | | | | L0769: 1, L0662: 1, | | |
| | | | | | | | L0768: 1, L0776: 1, | | |
| | | | | | | | L0655: 1, L0659: 1, | | |
| | | | | | | | L0526: 1, L0783: 1, | | |
| | | | | | | | L0789: 1, L0665: 1, | | |
| | | | | | | | S0148: 1, H0520: 1, | | |
| | | | | | | | H0519: 1, S0330: 1, | | |
| | | | | | | | L0602: 1, S0152: 1, | | |
| | | | | | | | S0136: 1, S0350: 1, | | |
| | | | | | | | L0752: 1, H0343: 1, | | |
| | | | | | | | L0366: 1, S0011: 1, | | |
| | | | | | | | H0665: 1, S0196: 1, | | |
| | | | | | | | H0423: 1, L0697: 1 and | | |
| | | | | | | | S0462: 1. | | |
| | | 911312 | 559 | 1-333 | 1157 | Lys-14 to Glu-27. | | | |
| 269 | HTTKP07 | 1119031 | 279 | 2-571 | 877 | Thr-15 to Asp-25, | AR089: 1, AR061: 1 | | |
| | | | | | | Glu-69 to Leu-89, | H0634: 2 | | |
| | | | | | | Glu-130 to Arg-137. | | | |
| | | 911390 | 560 | 2-337 | 1158 | Thr-15 to Asp-25, | | | |
| | | | | | | Glu-69 to Leu-89. | | | |
| 270 | HE9SE62 | 1171014 | 280 | 718-212 | 878 | | AR061: 16, AR089: 6 | | |
| | | | | | | | L0804: 1, S0052: 1, | | |
| | | | | | | | H0144: 1 and H0659: 1. | | |
| | | 911476 | 561 | 1-564 | 1159 | | | | |
| 271 | HUJAD24 | 1162674 | 281 | 788-1255 | 879 | Gln-49 to Thr-69, | AR089: 1, AR061: 0 | | |
| | | | | | | His-129 to Cys-143. | L0750: 3, H0650: 2, | | |
| | | | | | | | H0637: 2, H0265: 1, | | |
| | | | | | | | H0556: 1, S0222: 1, | | |
| | | | | | | | H0040: 1, H0280: 1, | | |
| | | | | | | | L0655: 1, L0789: 1 and | | |
| | | | | | | | L0666: 1. | | |
| | | 911498 | 562 | 3-293 | 1160 | | | | |
| 272 | HWLFG75 | 1228123 | 282 | 1-819 | 880 | Val-15 to Gly-26, | AR089: 1, AR061: 0 | | |
| | | | | | | Pro-43 to Ala-64, | L0439: 7, L0770: 4, | | |
| | | | | | | Arg-75 to Gly-82, | L0771: 4, L0779: 4, | | |
| | | | | | | Thr-115 to Thr-120, | H0688: 3, H0617: 2, | | |
| | | | | | | Leu-215 to Gly-222, | L0533: 2, L0803: 2, | | |
| | | | | | | Ser-230 to Trp-235, | L0807: 2, L0791: 2, | | |
| | | | | | | Pro-237 to Ala-248. | L0666: 2, H0539: 2, | | |
| | | | | | | | H0624: 1, S0400: 1, | | |
| | | | | | | | H0125: 1, H0192: 1, | | |
| | | | | | | | S0356: 1, S0354: 1, | | |
| | | | | | | | S0376: 1, S0360: 1, | | |
| | | | | | | | S0278: 1, H0550: 1, | | |
| | | | | | | | H0333: 1, S0049: 1, | | |
| | | | | | | | H0205: 1, S0051: 1, | | |
| | | | | | | | L0142: 1, L0455: 1, | | |
| | | | | | | | L0769: 1, L0794: 1, | | |
| | | | | | | | L0658: 1, L0540: 1, | | |
| | | | | | | | L0518: 1, L0809: 1, | | |
| | | | | | | | L0663: 1, H0689: 1, | | |
| | | | | | | | S0332: 1, H0214: 1, | | |
| | | | | | | | S3014: 1, L0747: 1, | | |
| | | | | | | | L0749: 1, L0758: 1, | | |
| | | | | | | | S0260: 1 and S0458: 1. | | |
| | | 916563 | 563 | 1-750 | 1161 | Val-10 to Gly-21, | | | |
| | | | | | | Pro-38 to Ala-59, | | | |
| | | | | | | Arg-70 to Gly-77, | | | |
| | | | | | | Thr-110 to Thr-115, | | | |
| | | | | | | Leu-210 to Gly-217, | | | |
| | | | | | | Ser-225 to Trp-230, | | | |
| | | | | | | Pro-232 to Arg-239. | | | |
| 273 | HT3BG12 | 1092417 | 283 | 9-785 | 881 | | AR061: 8, AR089: 3 | | |
| | | | | | | | L0758: 3, H0159: 2, | | |
| | | | | | | | S0001: 1, H0618: 1, | | |
| | | | | | | | H0660: 1 and L0779: 1. | | |
| | | 921593 | 564 | 1-381 | 1162 | Glu-1 to Ala-15, | | | |
| | | | | | | Lys-25 to Ser-32, | | | |
| | | | | | | Asp-45 to Thr-51, | | | |
| | | | | | | Pro-59 to Pro-65, | | | |
| | | | | | | Pro-78 to Ser-85. | | | |
| 274 | HTLJC71 | 922923 | 284 | 3-1355 | 882 | His-1 to Phe-9, | AR061: 7, AR089: 5 | | |
| | | | | | | Cys-13 to Thr-18, | H0618: 12, H0253: 8, | | |
| | | | | | | Pro-35 to Gly-48, | H0038: 6, L0758: 6, | | |
| | | | | | | Glu-61 to Pro-68, | L0779: 5, H0616: 3, | | |
| | | | | | | Lys-105 to Ala-136, | T0041: 1, L0776: 1, | | |
| | | | | | | Thr-144 to Gln-154, | S0274: 1 and H0543: 1. | | |
| | | | | | | Leu-163 to Gly-171, | | | |
| | | | | | | Thr-205 to Gln-222, | | | |
| | | | | | | Pro-251 to Gln-257. | | | |
| 275 | HCOMM05 | 1194701 | 285 | 2-850 | 883 | Gln-22 to Asp-41, | AR089: 1, AR061: 1 | | |
| | | | | | | Pro-49 to Thr-58, | H0670: 1 | | |
| | | | | | | Leu-99 to Gly-107, | | | |
| | | | | | | Ala-117 to Ala-122, | | | |
| | | | | | | Gln-128 to Trp-134, | | | |
| | | | | | | Pro-136 to Pro-144, | | | |
| | | | | | | Phe-147 to Glu-153, | | | |
| | | | | | | Glu-183 to Val-188, | | | |
| | | | | | | Glu-195 to Glu-200, | | | |
| | | | | | | Glu-257 to Leu-265, | | | |
| | | | | | | Met-275 to Ser-283. | | | |
| | | 925952 | 565 | 1-840 | 1163 | Gln-19 to Asp-38, | | | |
| | | | | | | Pro-46 to Thr-55, | | | |
| | | | | | | Leu-96 to Gly-104, | | | |
| | | | | | | Ala-114 to Ala-119, | | | |
| | | | | | | Gln-125 to Trp-131, | | | |
| | | | | | | Pro-133 to Pro-141, | | | |
| | | | | | | Phe-144 to Glu-150, | | | |
| | | | | | | Glu-180 to Val-185, | | | |
| | | | | | | Glu-192 to Glu-197, | | | |
| | | | | | | Glu-254 to Leu-262, | | | |
| | | | | | | Met-272 to Ser-280. | | | |
| 276 | HSLJE54 | 1229928 | 286 | 650-1654 | 884 | Ala-17 to Val-30, | AR061: 0, AR089: 0 | | |
| | | | | | | Thr-32 to Arg-39, | S0036: 1, H0521: 1, | | |
| | | | | | | Arg-55 to Ser-60, | H0436: 1 and S0390: 1. | | |
| | | | | | | Ala-213 to Leu-219, | | | |
| | | | | | | Glu-236 to Glu-241, | | | |
| | | | | | | Ser-262 to Tyr-272, | | | |
| | | | | | | Pro-299 to Asn-305. | | | |
| | | 926924 | 566 | 3-731 | 1164 | Arg-1 to Gly-7, | | | |
| | | | | | | Pro-25 to His-34, | | | |
| | | | | | | Leu-36 to Lys-49. | | | |
| 277 | HTGED07 | 927411 | 287 | 16-483 | 885 | Lys-35 to Asn-46. | AR089: 33, AR061: 7 | | |
| 278 | HOFNH30 | 928365 | 288 | 3-320 | 886 | | AR089: 4, AR061: 2 | | |
| | | | | | | | H0415: 13, H0414: 2, | | |
| | | | | | | | H0355: 1, H0517: 1 and | | |
| | | | | | | | H0539: 1. | | |
| 279 | HWNCY05 | 1179767 | 289 | 1-981 | 887 | Lys-15 to Gly-23, | AR061: 2, AR089: 1 | | |
| | | | | | | Glu-36 to His-47. | H0656: 2, S0360: 2, | | |
| | | | | | | | H0657: 1, H0662: 1, | | |
| | | | | | | | S0420: 1, S0356: 1, | | |
| | | | | | | | S0358: 1, S0132: 1, | | |
| | | | | | | | H0392: 1, S0022: 1, | | |
| | | | | | | | H0144: 1, H0520: 1, | | |
| | | | | | | | H0659: 1, H0658: 1, | | |
| | | | | | | | H0660: 1, H0672: 1, | | |
| | | | | | | | S0380: 1, L0602: 1, | | |
| | | | | | | | H0653: 1 and H0677: 1. | | |
| | | 928789 | 567 | 3-1319 | 1165 | Lys-11 to Gly-19, | | | |
| | | | | | | Glu-32 to His-43, | | | |
| | | | | | | Lys-60 to Glu-66, | | | |
| | | | | | | Pro-86 to Lys-98, | | | |
| | | | | | | Lys-118 to Leu-128, | | | |
| | | | | | | Thr-142 to Trp-148. | | | |
| 280 | HDPDA47 | 929193 | 290 | 103-906 | 888 | Arg-17 to Leu-34, | AR089: 11, AR061: 3 | | |
| | | | | | | Asp-44 to Ser-51, | H0521: 7, H0581: 3, | | |
| | | | | | | Asp-63 to Gly-72, | H0422: 3, H0650: 2, | | |
| | | | | | | Pro-74 to Gly-83, | H0486: 2, S0002: 2, | | |
| | | | | | | Thr-97 to Met-102. | L0770: 2, L0769: 2, | | |
| | | | | | | | L0766: 2, L0518: 2, | | |
| | | | | | | | L0783: 2, L0777: 2, | | |
| | | | | | | | L0731: 2, H0445: 2, | | |
| | | | | | | | H0556: 1, H0583: 1, | | |
| | | | | | | | H0657: 1, H0656: 1, | | |
| | | | | | | | H0341: 1, H0575: 1, | | |
| | | | | | | | H0457: 1, H0179: 1, | | |
| | | | | | | | H0271: 1, L0055: 1, | | |
| | | | | | | | H0264: 1, H0488: 1, | | |
| | | | | | | | S0426: 1, L0662: 1, | | |
| | | | | | | | L0775: 1, L0655: 1, | | |
| | | | | | | | L0665: 1, S0053: 1, | | |
| | | | | | | | H0702: 1, H0701: 1, | | |
| | | | | | | | H0659: 1, L0754: 1, | | |
| | | | | | | | L0779: 1, L0759: 1 and | | |
| | | | | | | | H0543: 1. | | |
| 281 | HWMEV63 | 931154 | 291 | 2-454 | 889 | His-9 to Asn-26, | AR089: 1, AR061: 1 | 3q21-q25 | 106165, |
| | | | | | | Pro-47 to Ser-61, | S0358: 1 and H0580: 1. | | 117700, |
| | | | | | | Arg-116 to Thr-122. | | | 117700, |
| | | | | | | | | | 150210, |
| | | | | | | | | | 169600, |
| | | | | | | | | | 180380, |
| | | | | | | | | | 180380, |
| | | | | | | | | | 180380, |
| | | | | | | | | | 190000, |
| | | | | | | | | | 203500, |
| | | | | | | | | | 222900, |
| | | | | | | | | | 232050, |
| | | | | | | | | | 276902, |
| | | | | | | | | | 600882, |
| | | | | | | | | | 601199, |
| | | | | | | | | | 601199, |
| | | | | | | | | | 601199, |
| | | | | | | | | | 601471, |
| | | | | | | | | | 601682 |
| 282 | HCFAT25 | 1052857 | 292 | 2-640 | 890 | Pro-19 to Lys-34, | AR061: 2, AR089: 2 | | |
| | | | | | | Arg-63 to Arg-72, | S0358: 1, H0413: 1, | | |
| | | | | | | Lys-76 to Pro-113, | L0502: 1, L0657: 1, | | |
| | | | | | | Gln-133 to Gln-150, | H0522: 1 and H0422: 1. | | |
| | | | | | | Gln-152 to Gln-163, | | | |
| | | | | | | Glu-167 to Arg-187. | | | |
| | | 932068 | 568 | 82-588 | 1166 | Lys-15 to Ser-20, | | | |
| | | | | | | Arg-51 to Arg-60, | | | |
| | | | | | | Lys-64 to Pro-101. | | | |
| 283 | HHEQV39 | 1165420 | 293 | 1-711 | 891 | Leu-7 to Phe-27, | AR089: 3, AR061: 1 | | |
| | | | | | | Gln-50 to Gln-57. | T0042: 1, H0543: 1 | | |
| | | | | | | | and H0422: 1. | | |
| | | 932851 | 569 | 1-711 | 1167 | Leu-7 to Phe-27, | | | |
| | | | | | | Gln-50 to Gln-57. | | | |
| 284 | HHFJH79 | 1228195 | 294 | 608-2260 | 892 | Ser-39 to Pro-44, | AR061: 2, AR089: 2 | | |
| | | | | | | Pro-51 to Thr-56, | H0424: 9, L0747: 7, | | |
| | | | | | | Gly-78 to Cys-92, | H0618: 5, H0620: 5, | | |
| | | | | | | Pro-133 to Ser-146, | L0809: 5, H0549: 4, | | |
| | | | | | | Glu-211 to Ala-219, | H0087: 4, L0655: 4, | | |
| | | | | | | His-239 to Gln-250, | L0750: 4, S0222: 3, | | |
| | | | | | | Thr-280 to Glu-285, | H0253: 3, S0346: 3, | | |
| | | | | | | Asn-347 to Gly-371, | H0150: 3, H0081: 3, | | |
| | | | | | | Asp-378 to Asn-385, | H0083: 3, H0188: 3, | | |
| | | | | | | Arg-390 to Gly-398, | H0428: 3, H0213: 3, | | |
| | | | | | | Thr-406 to Gly-420, | L0774: 3, L0805: 3, | | |
| | | | | | | Pro-422 to Gly-427, | L0749: 3, L0759: 3, | | |
| | | | | | | Arg-440 to Leu-450, | L0005: 2, H0619: 2, | | |
| | | | | | | Pro-458 to Gly-463, | S0278: 2, H0635: 2, | | |
| | | | | | | Pro-485 to Leu-490, | S0049: 2, H0251: 2, | | |
| | | | | | | Gly-526 to Pro-533. | H0546: 2, H0009: 2, | | |
| | | | | | | | H0012: 2, H0024: 2, | | |
| | | | | | | | H0617: 2, H0494: 2, | | |
| | | | | | | | L0769: 2, L0637: 2, | | |
| | | | | | | | L0772: 2, L0803: 2, | | |
| | | | | | | | L0518: 2, L0384: 2, | | |
| | | | | | | | L0665: 2, L0438: 2, | | |
| | | | | | | | H0547: 2, H0658: 2, | | |
| | | | | | | | S0152: 2, H0521: 2, | | |
| | | | | | | | L0439: 2, L0779: 2, | | |
| | | | | | | | L0758: 2, L0592: 2, | | |
| | | | | | | | L0599: 2, L0595: 2, | | |
| | | | | | | | H0543: 2, S0424: 2, | | |
| | | | | | | | H0352: 2, H0624: 1, | | |
| | | | | | | | H0686: 1, H0295: 1, | | |
| | | | | | | | S0114: 1, S0134: 1, | | |
| | | | | | | | H0341: 1, S0212: 1, | | |
| | | | | | | | H0254: 1, S0420: 1, | | |
| | | | | | | | S0354: 1, H0351: 1, | | |
| | | | | | | | H0550: 1, H0586: 1, | | |
| | | | | | | | H0333: 1, H0643: 1, | | |
| | | | | | | | L0623: 1, H0486: 1, | | |
| | | | | | | | T0039: 1, H0013: 1, | | |
| | | | | | | | T0082: 1, H0052: 1, | | |
| | | | | | | | H0597: 1, H0545: 1, | | |
| | | | | | | | H0178: 1, L0157: 1, | | |
| | | | | | | | H0594: 1, H0028: 1, | | |
| | | | | | | | H0604: 1, H0032: 1, | | |
| | | | | | | | H0674: 1, S0364: 1, | | |
| | | | | | | | H0361: 1, H0135: 1, | | |
| | | | | | | | H0551: 1, H0264: 1, | | |
| | | | | | | | H0100: 1, T0042: 1, | | |
| | | | | | | | H0561: 1, L0369: 1, | | |
| | | | | | | | L0770: 1, L0639: 1, | | |
| | | | | | | | L0800: 1, L0662: 1, | | |
| | | | | | | | L0768: 1, L0364: 1, | | |
| | | | | | | | L0794: 1, L0804: 1, | | |
| | | | | | | | L0375: 1, L0378: 1, | | |
| | | | | | | | L0653: 1, L0776: 1, | | |
| | | | | | | | L0659: 1, L0365: 1, | | |
| | | | | | | | L0542: 1, L0783: 1, | | |
| | | | | | | | L0789: 1, L0790: 1, | | |
| | | | | | | | L0791: 1, L0666: 1, | | |
| | | | | | | | S0052: 1, T0068: 1, | | |
| | | | | | | | H0689: 1, H0690: 1, | | |
| | | | | | | | H0684: 1, H0670: 1, | | |
| | | | | | | | H0660: 1, H0648: 1, | | |
| | | | | | | | H0672: 1, S0044: 1, | | |
| | | | | | | | L0741: 1, L0743: 1, | | |
| | | | | | | | L0748: 1, L0751: 1, | | |
| | | | | | | | L0756: 1, L0752: 1, | | |
| | | | | | | | L0731: 1, L0757: 1, | | |
| | | | | | | | H0665: 1, L0096: 1 and | | |
| | | | | | | | S0194: 1. | | |
| | | 933308 | 570 | 2-832 | 1168 | | | | |
| 285 | HUCOW17 | 1155190 | 295 | 1-993 | 893 | Ser-30 to Ser-35. | AR089: 4, AR061: 2 | | |
| | | | | | | | L0439: 5, S0002: 3, | | |
| | | | | | | | L0604: 3, H0619: 2, | | |
| | | | | | | | H0024: 2, H0625: 2, | | |
| | | | | | | | L0768: 2, L0757: 2, | | |
| | | | | | | | H0638: 1, S0420: 1, | | |
| | | | | | | | S0360: 1, H0586: 1, | | |
| | | | | | | | L0163: 1, S0214: 1, | | |
| | | | | | | | L0143: 1, H0264: 1, | | |
| | | | | | | | L0769: 1, L0764: 1, | | |
| | | | | | | | L0774: 1, L0651: 1, | | |
| | | | | | | | L0659: 1, L0542: 1, | | |
| | | | | | | | L0789: 1, H0539: 1, | | |
| | | | | | | | H0521: 1, S0044: 1, | | |
| | | | | | | | L0777: 1, L0758: 1, | | |
| | | | | | | | L0599: 1 and H0422: 1. | | |
| | | 933357 | 571 | 155-856 | 1169 | Gln-27 to Trp-45. | | | |
| 286 | HFKIT06 | 1078092 | 296 | 1-1119 | 894 | Lys-6 to Trp-11, | AR089: 0, AR061: 0 | | |
| | | | | | | Pro-26 to Pro-40, | H0620: 2, L0761: 2, | | |
| | | | | | | Pro-48 to Gln-53. | L0766: 2, L0744: 2, | | |
| | | | | | | | L0754: 2, L0596: 2, | | |
| | | | | | | | H0686: 1, H0295: 1, | | |
| | | | | | | | H0657: 1, H0597: 1, | | |
| | | | | | | | H0009: 1, H0264: 1, | | |
| | | | | | | | S0002: 1, L0769: 1, | | |
| | | | | | | | L0774: 1, L0805: 1, | | |
| | | | | | | | L0657: 1, L0790: 1, | | |
| | | | | | | | H0690: 1 and H0521: 1. | | |
| | | 934019 | 572 | 1-300 | 1170 | Asp-2 to Pro-7, | | | |
| | | | | | | Pro-15 to Gln-20. | | | |
| 287 | HDTBY88 | 1104159 | 297 | 3-536 | 895 | His-130 to Lys-140. | AR089: 8, AR061: 2 | | |
| | | | | | | | S0218: 1 and H0486: 1. | | |
| | | 934472 | 573 | 3-464 | 1171 | His-130 to Lys-140. | | | |
| 288 | HWLHS82 | 1082268 | 298 | 3-1349 | 896 | Pro-22 to Thr-29, | AR089: 2, AR061: 1 | | |
| | | | | | | Gly-65 to Lys-75. | L0769: 3, S0354: 1, | | |
| | | | | | | | H0393: 1, H0355: 1 and | | |
| | | | | | | | H0124: 1. | | |
| | | 934505 | 574 | 2-427 | 1172 | Gly-34 to Lys-44, | | | |
| | | | | | | Glu-113 to Glu-118. | | | |
| 289 | HDPNC96 | 1081629 | 299 | 3-734 | 897 | Val-2 to Gly-8, | AR089: 1, AR061: 1 | | |
| | | | | | | Asp-20 to Gln-26. | H0522: 2 and L0766: | | |
| | | | | | | | 1. | | |
| | | 934520 | 575 | 3-734 | 1173 | Val-2 to Gly-8, | | | |
| | | | | | | Asp-20 to Gln-26. | | | |
| 290 | HCE5I78 | 1197899 | 300 | 2-1126 | 898 | Ala-7 to Gly-15, | AR061: 5, AR089: 2 | | |
| | | | | | | Pro-33 to Gln-39, | L0439: 8, H0052: 7, | | |
| | | | | | | Ala-48 to Ala-71, | L0741: 7, L0756: 4, | | |
| | | | | | | Tyr-83 to Ser-89, | S0010: 3, H0261: 2, | | |
| | | | | | | Ser-122 to Ile-139, | H0156: 2, S0049: 2, | | |
| | | | | | | Thr-150 to Thr-158, | L0770: 2, L0776: 2, | | |
| | | | | | | Lys-183 to Phe-193, | L0742: 2, L0745: 2, | | |
| | | | | | | Pro-277 to Asn-299, | L0366: 2, S0222: 1, | | |
| | | | | | | Asp-324 to Gly-333, | H0438: 1, H0390: 1, | | |
| | | | | | | Lys-354 to Glu-361, | S0346: 1, H0009: 1, | | |
| | | | | | | Gln-367 to Ser-374. | L0455: 1, S0038: 1, | | |
| | | | | | | | L0789: 1 and L0758: 1. | | |
| | | 934531 | 576 | 3-422 | 1174 | Pro-14 to Gln-20, | | | |
| | | | | | | Ala-29 to Ala-52, | | | |
| | | | | | | Tyr-64 to Ser-70, | | | |
| | | | | | | Ser-103 to His-120. | | | |
| 291 | HISDS62 | 1159625 | 301 | 182-862 | 899 | Ser-39 to Trp-44, | AR089: 2, AR061: 1 | | |
| | | | | | | Ile-48 to Trp-54, | T0049: 1, S0278: 1, | | |
| | | | | | | Asn-65 to Asp-87, | H0031: 1 and H0539: 1. | | |
| | | | | | | Pro-94 to Gln-100, | | | |
| | | | | | | Lys-129 to Asp-136, | | | |
| | | | | | | Asp-163 to His-174, | | | |
| | | | | | | Ser-193 to His-199. | | | |
| | | 935932 | 577 | 1-519 | 1175 | Ser-11 to Trp-16, | | | |
| | | | | | | Ile-20 to Trp-26, | | | |
| | | | | | | Asn-37 to Ser-58, | | | |
| | | | | | | Leu-67 to Gln-72, | | | |
| | | | | | | Lys-101 to Asp-108, | | | |
| | | | | | | Asp-135 to Tyr-140. | | | |
| 292 | HDQDV69 | 1212566 | 302 | 210-1697 | 900 | Met-7 to Ser-12, | AR089: 46, AR061: 33 | | |
| | | | | | | Ser-20 to Arg-30, | H0521: 4, H0051: 2, | | |
| | | | | | | Asp-85 to Ala-92, | L0803: 2, L0748: 2, | | |
| | | | | | | Met-119 to Asn-146, | L0740: 2, L0756: 2, | | |
| | | | | | | Pro-151 to Asp-161, | L0752: 2, L0755: 2, | | |
| | | | | | | Gln-253 to Glu-260, | H0590: 1, H0014: 1, | | |
| | | | | | | Ile-333 to Val-342, | S0250: 1, L0772: 1, | | |
| | | | | | | Leu-396 to Ala-406. | L0764: 1, L0804: 1, | | |
| | | | | | | | H0522: 1, S0406: 1, | | |
| | | | | | | | L0754: 1, L0779: 1, | | |
| | | | | | | | L0731: 1 and L0758: 1. | | |
| | | 937850 | 578 | 2-829 | 1176 | | | | |
| | | 949702 | 579 | 551-339 | 1177 | Lys-1 to Thr-7, | | | |
| | | | | | | Arg-34 to Pro-41. | | | |
| 293 | HEMBT61 | 939957 | 303 | 1-351 | 901 | | AR061: 8, AR089: 4 | | |
| | | | | | | | L0547: 2, S0046: 1, | | |
| | | | | | | | L0471: 1, L0772: 1, | | |
| | | | | | | | L0529: 1 and L0780: 1. | | |
| 294 | HRODZ70 | 1088554 | 304 | 2-661 | 902 | Lys-123 to Lys-128, | AR089: 12, AR061: 4 | | |
| | | | | | | Trp-180 to Lys-186, | H0598: 1 and H0135: | | |
| | | | | | | Leu-204 to Thr-220. | 1. | | |
| | | 942673 | 580 | 3-440 | 1178 | Lys-49 to Lys-54, | | | |
| | | | | | | Trp-106 to Lys-112, | | | |
| | | | | | | Leu-130 to Gly-141. | | | |
| 295 | HHERQ79 | 1184003 | 305 | 284-703 | 903 | Ser-3 to Thr-11, | AR089: 3, AR061: 2 | | |
| | | | | | | Lys-32 to Gly-39, | H0597: 1, H0435: 1 | | |
| | | | | | | Thr-50 to Glu-57, | and H0543: 1. | | |
| | | | | | | Thr-83 to Gln-88. | | | |
| | | 944057 | 581 | 88-474 | 1179 | Ser-3 to Thr-11, | | | |
| | | | | | | Lys-32 to Gly-39, | | | |
| | | | | | | Thr-50 to Glu-57, | | | |
| | | | | | | Thr-83 to Gln-88. | | | |
| 296 | HCECM90 | 1031741 | 306 | 2-577 | 904 | Gly-12 to Gly-31, | AR061: 2, AR089: 1 | | |
| | | | | | | Asn-38 to Gly-62, | H0013: 3, L0439: 2, | | |
| | | | | | | Asp-70 to Phe-84, | H0624: 1, H0171: 1, | | |
| | | | | | | Val-94 to Ser-101, | S0040: 1, S0420: 1, | | |
| | | | | | | Ala-112 to Ser-125, | H0619: 1, H0156: 1, | | |
| | | | | | | Lys-140 to Asn-145, | H0575: 1, H0590: 1, | | |
| | | | | | | Asn-175 to Tyr-180, | H0052; 1, H0011: 1, | | |
| | | | | | | Arg-187 to Thr-192. | H0266: 1, H0494: 1, | | |
| | | | | | | | L0519: 1, H0519: 1, | | |
| | | | | | | | H0555: 1, L0777: 1, | | |
| | | | | | | | L0758: 1, S0436: 1 and | | |
| | | | | | | | H0506: 1. | | |
| | | 945088 | 582 | 2-577 | 1180 | Gly-12 to Gly-31, | | | |
| | | | | | | Asn-38 to Gly-62, | | | |
| | | | | | | Asp-70 to Phe-84, | | | |
| | | | | | | Val-94 to Ser-101, | | | |
| | | | | | | Ala-112 to Ser-125, | | | |
| | | | | | | Lys-140 to Asn-145, | | | |
| | | | | | | Asn-175 to Tyr-180, | | | |
| | | | | | | Arg-187 to Thr-192. | | | |
| 297 | HWHGW72 | 1199614 | 307 | 3-1208 | 905 | Lys-63 to Pro-72, | AR054: 23, AR050: | | |
| | | | | | | Val-97 to Gly-102, | 16, AR051: 3, AR089: | | |
| | | | | | | His-116 to Cys-123, | 1, AR061: 1 | | |
| | | | | | | Tyr-161 to Thr-167, | H0586: 1 and L0375: | | |
| | | | | | | Pro-204 to Lys-210, | 1. | | |
| | | | | | | Ala-214 to Lys-222, | | | |
| | | | | | | Glu-276 to Lys-289, | | | |
| | | | | | | Tyr-305 to Thr-312, | | | |
| | | | | | | Pro-383 to Gly-398. | | | |
| | | 945692 | 583 | 100-939 | 1181 | | | | |
| | | 947361 | 584 | 327-1 | 1182 | Gly-1 to Gly-7, | | | |
| | | | | | | Ala-13 to Gln-21, | | | |
| | | | | | | Ala-43 to Ser-48, | | | |
| | | | | | | Asn-67 to Gly-75, | | | |
| | | | | | | Pro-82 to Pro-90. | | | |
| 298 | HPCRV84 | 1219890 | 308 | 123-875 | 906 | Thr-1 to Leu-12, | AR089: 0, AR061: 0 | | |
| | | | | | | Asp-107 to Thr-114, | | | |
| | | | | | | Pro-162 to Leu-170. | | | |
| | | 945856 | 585 | 112-417 | 1183 | Thr-1 to Leu-12. | | | |
| 299 | HNSAA28 | 946988 | 309 | 85-1557 | 907 | Glu-9 to Ser-20, | AR050: 8, AR054: 6, | | |
| | | | | | | Ile-23 to Gly-29, | AR051: 3, AR089: 1, | | |
| | | | | | | Pro-50 to Cys-66, | AR061: 1 | | |
| | | | | | | Pro-74 to Glu-79, | H0036: 2, L0766: 2, | | |
| | | | | | | Glu-93 to Trp-98, | H0686: 1, H0622: 1, | | |
| | | | | | | Thr-121 to Ser-133, | H0625: 1, L0791: 1, | | |
| | | | | | | Leu-180 to Lys-196, | L0779: 1 and S0434: 1. | | |
| | | | | | | Thr-213 to Glu-225, | | | |
| | | | | | | Glu-234 to Glu-240, | | | |
| | | | | | | Arg-263 to Glu-270, | | | |
| | | | | | | Glu-283 to Ala-298, | | | |
| | | | | | | Lys-318 to Ala-336, | | | |
| | | | | | | Val-340 to Ala-351, | | | |
| | | | | | | Val-361 to Pro-372, | | | |
| | | | | | | Asn-445 to Pro-468, | | | |
| | | | | | | Pro-475 to Lys-491. | | | |
| | | 972348 | 586 | 3-452 | 1184 | Thr-1 to Ala-10, | | | |
| | | | | | | Val-20 to Pro-31, | | | |
| | | | | | | Asn-104 to Thr-124. | | | |
| 300 | HLWAR77 | 947484 | 310 | 1287-292 | 908 | Gln-97 to Pro-114, | AR050: 21, AR054: 9, | | |
| | | | | | | Trp-117 to Lys-129, | AR051: 3, AR089: 1, | | |
| | | | | | | Thr-166 to Gln-173, | AR061: 1 | | |
| | | | | | | Ser-178 to Lys-183, | H0553: 4 and L0759: | | |
| | | | | | | Glu-250 to Phe-256, | 2. | | |
| | | | | | | Ser-295 to His-301, | | | |
| | | | | | | Tyr-307 to Gln-316, | | | |
| | | | | | | Glu-322 to Ser-330. | | | |
| 301 | HTTJW49 | 1127477 | 311 | 423-1319 | 909 | Phe-8 to Gln-13, | AR061: 3, AR089: 2 | | |
| | | | | | | Arg-63 to Gly-69, | L0769: 3, L0803: 3, | | |
| | | | | | | Gly-135 to Lys-144, | L0748: 3, L0749: 3, | | |
| | | | | | | Ala-201 to Ala-211, | H0574: 2, H0046: 2, | | |
| | | | | | | Arg-248 to Thr-255, | L0794: 2, L0776: 2, | | |
| | | | | | | Leu-294 to Pro-299. | L0439: 2, L0754: 2, | | |
| | | | | | | | L0747: 2, L0755: 2, | | |
| | | | | | | | L0605: 2, L0593: 2, | | |
| | | | | | | | H0686: 1, S0360: 1, | | |
| | | | | | | | L0717: 1, H0069: 1, | | |
| | | | | | | | H0575: 1, H0620: 1, | | |
| | | | | | | | H0024: 1, S0388: 1, | | |
| | | | | | | | H0510: 1, H0266: 1, | | |
| | | | | | | | H0644: 1, H0163: 1, | | |
| | | | | | | | H0090: 1, H0634: 1, | | |
| | | | | | | | H0561: 1, H0695: 1, | | |
| | | | | | | | L0763: 1, L0804: 1, | | |
| | | | | | | | L0774: 1, L0775: 1, | | |
| | | | | | | | L0659: 1, L0783: 1, | | |
| | | | | | | | L0809: 1, L0666: 1, | | |
| | | | | | | | L0665: 1, L0438: 1, | | |
| | | | | | | | H0519: 1, H0658: 1, | | |
| | | | | | | | H0539: 1, S0152: 1, | | |
| | | | | | | | H0522: 1, L0740: 1, | | |
| | | | | | | | L0777: 1, L0603: 1, | | |
| | | | | | | | S0276: 1 and H0542: 1. | | |
| | | 948107 | 587 | 25-660 | 1185 | Val-11 to Gly-21, | | | |
| | | | | | | Gly-72 to Thr-80. | | | |
| 302 | HWAFS18 | 1155193 | 312 | 54-1718 | 910 | Pro-1 to Pro-7, | AR089: 4, AR061: 3 | | |
| | | | | | | Leu-10 to Lys-18, | H0581: 3, H0622: 3, | | |
| | | | | | | Val-119 to Lys-126, | H0575: 2, H0090: 2, | | |
| | | | | | | Gln-146 to Trp-151. | L0777: 2, L0757: 2, | | |
| | | | | | | | S0114: 1, H0650: 1, | | |
| | | | | | | | H0255: 1, S0360: 1, | | |
| | | | | | | | S0278: 1, H0486: 1, | | |
| | | | | | | | H0318: 1, H0457: 1, | | |
| | | | | | | | H0039: 1, H0553: 1, | | |
| | | | | | | | L0763: 1, L0761: 1, | | |
| | | | | | | | L0764: 1, L0789: 1, | | |
| | | | | | | | H0144: 1, S0374: 1, | | |
| | | | | | | | S0310: 1, H0555: 1, | | |
| | | | | | | | L0758: 1, H0445: 1 and | | |
| | | | | | | | S0276: 1. | | |
| | | 948434 | 588 | 54-791 | 1186 | Pro-1 to Pro-7, | | | |
| | | | | | | Leu-10 to Lys-18, | | | |
| | | | | | | Val-119 to Lys-126, | | | |
| | | | | | | Gln-146 to Trp-151, | | | |
| | | | | | | Asp-210 to Arg-216. | | | |
| 303 | HFCBA44 | 1082762 | 313 | 1-669 | 911 | | AR089: 14, AR061: 9 | | |
| | | | | | | | H0457: 1, H0009: 1, | | |
| | | | | | | | L0666: 1, S0053: 1 and | | |
| | | | | | | | L0741: 1. | | |
| | | 948533 | 589 | 192-494 | 1187 | | | | |
| 304 | HVADT77 | 1180374 | 314 | 1-249 | 912 | Thr-28 to Lys-34, | AR089: 4, AR061: 2 | | |
| | | | | | | Pro-36 to Asn-44, | L0744: 9, L0747: 8, | | |
| | | | | | | Lys-72 to Lys-83. | S3014: 7, L0740: 7, | | |
| | | | | | | | S0192: 6, S0027: 5, | | |
| | | | | | | | S0212: 4, H0124: 4, | | |
| | | | | | | | L0731: 4, L0662: 3, | | |
| | | | | | | | L0743: 3, L0752: 3, | | |
| | | | | | | | L0759: 3, H0662: 2, | | |
| | | | | | | | S0418: 2, S0046: 2, | | |
| | | | | | | | H0575: 2, H0545: 2, | | |
| | | | | | | | H0041: 2, H0413: 2, | | |
| | | | | | | | L0775: 2, H0696: 2, | | |
| | | | | | | | L0748: 2, L0751: 2, | | |
| | | | | | | | L0754: 2, L0749: 2, | | |
| | | | | | | | L0758: 2, H0445: 2, | | |
| | | | | | | | S0276: 2, H0624: 1, | | |
| | | | | | | | L0778: 1, L0005: 1, | | |
| | | | | | | | H0645: 1, H0441: 1, | | |
| | | | | | | | H0391: 1, S0005: 1, | | |
| | | | | | | | T0040: 1, H0069: 1, | | |
| | | | | | | | H0427: 1, S0280: 1, | | |
| | | | | | | | H0042: 1, T0048: 1, | | |
| | | | | | | | H0505: 1, H0309: 1, | | |
| | | | | | | | H0544: 1, H0009: 1, | | |
| | | | | | | | H0266: 1, H0617: 1, | | |
| | | | | | | | H0412: 1, H0623: 1, | | |
| | | | | | | | T0004: 1, L0564: 1, | | |
| | | | | | | | T0041: 1, H0494: 1, | | |
| | | | | | | | H0633: 1, H0646: 1, | | |
| | | | | | | | H0652: 1, L0769: 1, | | |
| | | | | | | | L0646: 1, L0655: 1, | | |
| | | | | | | | L0659: 1, L0546: 1, | | |
| | | | | | | | L0783: 1, L0809: 1, | | |
| | | | | | | | H0144: 1, L0565: 1, | | |
| | | | | | | | S0126: 1, H0689: 1, | | |
| | | | | | | | H0435: 1, H0659: 1, | | |
| | | | | | | | H0672: 1, S0378: 1, | | |
| | | | | | | | H0555: 1, S0037: 1, | | |
| | | | | | | | S0206: 1, L0777: 1, | | |
| | | | | | | | L0780: 1, S0434: 1, | | |
| | | | | | | | S0011: 1, S0194: 1 and | | |
| | | | | | | | H0506: 1. | | |
| | | 948886 | 590 | 1-330 | 1188 | Thr-11 to Trp-25, | | | |
| | | | | | | Ser-35 to Arg-42, | | | |
| | | | | | | Asp-50 to Arg-56, | | | |
| | | | | | | Tyr-75 to Ser-81, | | | |
| | | | | | | Gly-89 to Gln-104. | | | |
| 305 | HUFCN91 | 1189013 | 315 | 25-858 | 913 | Cys-7 to Ala-24, | AR089: 2, AR061: 2 | | |
| | | | | | | Asn-30 to Asn-42, | H0441: 5, H0134: 3, | | |
| | | | | | | Ser-80 to Ser-89, | H0050: 2, S0038: 2, | | |
| | | | | | | Leu-130 to Arg-135, | L0777: 2, H0583: 1, | | |
| | | | | | | Leu-142 to Ser-150, | H0650: 1, H0656: 1, | | |
| | | | | | | Ser-206 to Leu-217, | H0255: 1, H0125: 1, | | |
| | | | | | | Arg-234 to Trp-240. | H0192: 1, H0676: 1, | | |
| | | | | | | | H0438: 1, S0049: 1, | | |
| | | | | | | | H0038: 1, H0529: 1, | | |
| | | | | | | | H0690: 1, L0439: 1, | | |
| | | | | | | | H0677: 1 and H0506: 1. | | |
| | | 949137 | 591 | 25-924 | 1189 | Cys-7 to Ala-24, | | | |
| | | | | | | Asn-30 to Asn-42, | | | |
| | | | | | | Ser-80 to Ser-89, | | | |
| | | | | | | Leu-130 to Arg-135, | | | |
| | | | | | | Leu-142 to Ser-150, | | | |
| | | | | | | Tyr-161 to Arg-166. | | | |
| 306 | HAGBX32 | 951351 | 316 | 3-509 | 914 | Gly-14 to Gly-32, | AR061: 4, AR089: 4 | | 108730, |
| | | | | | | Pro-60 to Ala-70, | L0439: 4, L0418: 1, | | 147781, |
| | | | | | | Thr-145 to Gly-153, | S0010: 1, L0455: 1, | | 172471, |
| | | | | | | Ser-164 to Leu-169. | S0028: 1 and L0741: 1. | | 186580, |
| | | | | | | | | | 264800, |
| | | | | | | | | | 266600, |
| | | | | | | | | | 278760, |
| | | | | | | | | | 600760, |
| | | | | | | | | | 600760, |
| | | | | | | | | | 600761, |
| | | | | | | | | | 600761, |
| | | | | | | | | | 602066 |
| | | 956281 | 592 | 473-138 | 1190 | Phe-4 to Gly-12. | | | |
| 307 | HWMIB81 | 1092933 | 317 | 3-572 | 915 | Ile-94 to Asp-99, | AR061: 1, AR089: 1 | | |
| | | | | | | Asp-118 to Pro-123, | L0748: 2, H0171: 1, | | |
| | | | | | | Glu-131 to Ile-140, | S0134: 1, S0354: 1, | | |
| | | | | | | Tyr-143 to Asp-152, | S0358: 1, H0014: 1, | | |
| | | | | | | Glu-169 to Lys-179. | H0083: 1, H0510: 1, | | |
| | | | | | | | L0764: 1, L0803: 1, | | |
| | | | | | | | L0789: 1, H0593: 1, | | |
| | | | | | | | H0659: 1, H0539: 1, | | |
| | | | | | | | H0555: 1, L0751: 1, | | |
| | | | | | | | L0758: 1, L0759: 1 and | | |
| | | | | | | | L0595: 1. | | |
| | | 955336 | 593 | 1491-922 | 1191 | Ile-94 to Asp-99, | | | |
| | | | | | | Asp-118 to Pro-123, | | | |
| | | | | | | Glu-131 to Ile-140, | | | |
| | | | | | | Tyr-143 to Asp-152, | | | |
| | | | | | | Glu-169 to Lys-179. | | | |
| 308 | HCEMU86 | 1156430 | 318 | 1-795 | 916 | Ser-3 to Lys-8, | AR061: 3, AR089: 2 | | |
| | | | | | | His-29 to Lys-38, | L0439: 21, L0438: 12, | | |
| | | | | | | Pro-201 to Thr-206. | L0769: 9, T0010: 6, | | |
| | | | | | | | H0052: 5, L0776: 4, | | |
| | | | | | | | L0805: 3, S0126: 3, | | |
| | | | | | | | L0741: 3, L0589: 3, | | |
| | | | | | | | H0261: 2, T0006: 2, | | |
| | | | | | | | L0455: 2, L0659: 2, | | |
| | | | | | | | H0519: 2, L0742: 2, | | |
| | | | | | | | L0748: 2, L0751: 2, | | |
| | | | | | | | L0592: 2, S0276: 2, | | |
| | | | | | | | L0583: 1, L0418: 1, | | |
| | | | | | | | S0298: 1, S0001: 1, | | |
| | | | | | | | S0400: 1, L0394: 1, | | |
| | | | | | | | S0222: 1, H0455: 1, | | |
| | | | | | | | H0331: 1, H0156: 1, | | |
| | | | | | | | T0082: 1, N0006: 1, | | |
| | | | | | | | S6028: 1, H0644: 1, | | |
| | | | | | | | S0036: 1, H0100: 1, | | |
| | | | | | | | L0351: 1, S0352: 1, | | |
| | | | | | | | L0598: 1, L0369: 1, | | |
| | | | | | | | L0638: 1, L0666: 1, | | |
| | | | | | | | H0520: 1, L0777: 1, | | |
| | | | | | | | L0752: 1, L0753: 1, | | |
| | | | | | | | L0758: 1, L0593: 1 and | | |
| | | | | | | | L0366: 1. | | |
| | | 956864 | 594 | 2520-1735 | 1192 | His-26 to Lys-35, | | | |
| | | | | | | Pro-198 to Thr-203. | | | |
| 309 | HRDAF83 | 1153911 | 319 | 368-3 | 917 | | AR051: 23, AR050: | | |
| | | | | | | | 20, AR054: 11, AR061: | | |
| | | | | | | | 9, AR089: 5 | | |
| | | | | | | | S0250: 8, S0126: 8, | | |
| | | | | | | | H0251: 3, H0545: 2, | | |
| | | | | | | | H0252: 2, L0794: 2, | | |
| | | | | | | | L0565: 2, L0744: 2, | | |
| | | | | | | | L0757: 2, S0040: 1, | | |
| | | | | | | | S0212: 1, S0418: 1, | | |
| | | | | | | | S0360: 1, H0549: 1, | | |
| | | | | | | | H0024: 1, L0053: 1, | | |
| | | | | | | | H0124: 1, S0208: 1, | | |
| | | | | | | | S0011: 1 and S0276: 1. | | |
| | | 957143 | 595 | 36-344 | 1193 | Asn-66 to Val-71, | | | |
| | | | | | | Glu-82 to Thr-91. | | | |
| | | 963999 | 596 | 230-3 | 1194 | Ser-42 to Arg-50, | | | |
| | | | | | | Gln-66 to Val-73. | | | |
| 310 | HUVGZ88 | 1204719 | 320 | 503-1288 | 918 | Pro-14 to His-20, | AR089: 2, AR061: 2 | | |
| | | | | | | Gln-82 to Asp-92, | L0789: 4, L0758: 4, | | |
| | | | | | | Ser-161 to Phe-179, | H0657: 3, H0052: 3, | | |
| | | | | | | Cys-190 to Ser-200, | L0438: 3, L0744: 3, | | |
| | | | | | | Gln-212 to Ala-217, | L0779: 3, L0005: 2, | | |
| | | | | | | Glu-235 to Ser-243. | H0581: 2, H0194: 2, | | |
| | | | | | | | H0046: 2, H0038: 2, | | |
| | | | | | | | L0800: 2, L0659: 2, | | |
| | | | | | | | H0521: 2, L0743: 2, | | |
| | | | | | | | L0439: 2, H0556: 1, | | |
| | | | | | | | S0282: 1, S0358: 1, | | |
| | | | | | | | H0619: 1, H0586: 1, | | |
| | | | | | | | H0618: 1, H0231: 1, | | |
| | | | | | | | S0362: 1, H0622: 1, | | |
| | | | | | | | T0006: 1, H0616: 1, | | |
| | | | | | | | H0413: 1, H0623: 1, | | |
| | | | | | | | L0351: 1, S0150: 1, | | |
| | | | | | | | L0769: 1, L0372: 1, | | |
| | | | | | | | L0662: 1, L0794: 1, | | |
| | | | | | | | L0775: 1, L0651: 1, | | |
| | | | | | | | L0527: 1, L0657: 1, | | |
| | | | | | | | L0666: 1, H0547: 1, | | |
| | | | | | | | H0690: 1, H0658: 1, | | |
| | | | | | | | H0672: 1, H0539: 1, | | |
| | | | | | | | S0378: 1, H0555: 1, | | |
| | | | | | | | L0754: 1, L0747: 1, | | |
| | | | | | | | L0780: 1, L0596: 1, | | |
| | | | | | | | S0192: 1, H0542: 1 and | | |
| | | | | | | | H0423: 1. | | |
| | | 959020 | 597 | 83-439 | 1195 | Asn-89 to Asn-95. | | | |
| 311 | HSCKS55 | 1197921 | 321 | 3-1646 | 919 | Asp-1 to Gly-12, | AR089: 13, AR061: 5 | | |
| | | | | | | Ala-24 to Gln-29, | H0617: 6, H0556: 4, | | |
| | | | | | | Ala-43 to Asn-61, | H0305: 3, S0007: 3, | | |
| | | | | | | Ala-68 to Gly-81, | H0618: 3, H0521: 3, | | |
| | | | | | | Pro-84 to Gln-99, | L0439: 3, H0672: 2, | | |
| | | | | | | Glu-105 to Gln-110, | L0754: 2, L0600: 2, | | |
| | | | | | | Ala-118 to Asp-123, | S0442: 1, S0354: 1, | | |
| | | | | | | Arg-170 to Leu-175, | S0358: 1, S0045: 1, | | |
| | | | | | | Pro-296 to Thr-306, | S0046: 1, S0222: 1, | | |
| | | | | | | Asn-311 to Gln-320, | H0438: 1, H0587: 1, | | |
| | | | | | | Arg-327 to Ala-335, | H0599: 1, H0036: 1, | | |
| | | | | | | Asp-382 to Gly-389, | H0597: 1, H0530: 1, | | |
| | | | | | | Ala-441 to Pro-451, | L0118: 1, H0570: 1, | | |
| | | | | | | Val-464 to Cys-491, | H0023: 1, S0250: 1, | | |
| | | | | | | Ser-495 to Gly-504, | H0039: 1, H0181: 1, | | |
| | | | | | | Asp-509 to Trp-516, | H0674: 1, S0036: 1, | | |
| | | | | | | Gly-518 to Pro-527. | L0351: 1, T0041: 1, | | |
| | | | | | | | H0494: 1, H0509: 1, | | |
| | | | | | | | L0769: 1, L0761: 1, | | |
| | | | | | | | L0764: 1, L0768: 1, | | |
| | | | | | | | L0806: 1, H0519: 1, | | |
| | | | | | | | H0593: 1, H0670: 1, | | |
| | | | | | | | H0660: 1, S3014: 1, | | |
| | | | | | | | L0741: 1, L0779: 1 and | | |
| | | | | | | | H0667: 1. | | |
| | | 961074 | 598 | 703-1704 | 1196 | Pro-72 to Thr-82, | | | |
| | | | | | | Asn-87 to Gln-96, | | | |
| | | | | | | Arg-103 to Ala-111, | | | |
| | | | | | | Asp-158 to Gly-165. | | | |
| 312 | HOEET48 | 963290 | 322 | 2-1030 | 920 | Ala-8 to Gly-14, | AR061: 9, AR089: 5 | | |
| | | | | | | Gly-32 to Arg-48, | S0356: 17, S0212: 6, | | |
| | | | | | | Ala-58 to Asn-66, | L0747: 6, S0360: 5, | | |
| | | | | | | Glu-82 to Gln-92, | H0486: 5, S0418: 3, | | |
| | | | | | | Arg-101 to Gly-110, | H0551: 3, S0040: 2, | | |
| | | | | | | Thr-124 to Asp-131, | S0354: 2, H0599: 2, | | |
| | | | | | | Trp-137 to Gly-146, | H0544: 2, H0617: 2, | | |
| | | | | | | Leu-153 to His-160, | H0413: 2, S0210: 2, | | |
| | | | | | | Glu-171 to Lys-177, | L0794: 2, S0126: 2, | | |
| | | | | | | Asp-191 to Ser-196, | S0037: 2, S0027: 2, | | |
| | | | | | | Glu-225 to Gly-233, | L0743: 2, H0665: 2, | | |
| | | | | | | Glu-248 to Glu-253, | S0192: 2, S0196: 2, | | |
| | | | | | | Thr-259 to Trp-265, | S0116: 1, H0662: 1, | | |
| | | | | | | Arg-268 to Asp-277, | S0420: 1, H0619: 1, | | |
| | | | | | | Glu-303 to Arg-311, | H0550: 1, H0013: 1, | | |
| | | | | | | Ala-329 to Leu-343. | H0618: 1, H0253: 1, | | |
| | | | | | | | H0251: 1, H0546: 1, | | |
| | | | | | | | H0545: 1, H0086: 1, | | |
| | | | | | | | H0123: 1, H0024: 1, | | |
| | | | | | | | H0286: 1, H0252: 1, | | |
| | | | | | | | H0628: 1, S0294: 1, | | |
| | | | | | | | L0372: 1, L0646: 1, | | |
| | | | | | | | L0773: 1, L0806: 1, | | |
| | | | | | | | L0654: 1, L0790: 1, | | |
| | | | | | | | L0565: 1, H0689: 1, | | |
| | | | | | | | H0670: 1, H0660: 1, | | |
| | | | | | | | S0028: 1, S0032: 1, | | |
| | | | | | | | L0751: 1, L0754: 1, | | |
| | | | | | | | L0749: 1, L0777: 1, | | |
| | | | | | | | L0780: 1, L0595: 1, | | |
| | | | | | | | H0668: 1, H0667: 1, | | |
| | | | | | | | S0276: 1, S0424: 1 and | | |
| | | | | | | | H0352: 1. | | |
| 313 | HBODE51 | 1193149 | 323 | 2704-1739 | 921 | Phe-2 to Asp-13, | AR089: 4, AR061: 1 | | |
| | | | | | | Ser-47 to Gly-52, | L0751: 4, H0052: 3, | | |
| | | | | | | Arg-161 to Asp-167, | S0024: 3, S0364: 3, | | |
| | | | | | | Leu-256 to Leu-261, | L0438: 3, L0439: 3, | | |
| | | | | | | Asp-288 to Asn-296. | H0657: 2, L0415: 2, | | |
| | | | | | | | H0438: 2, H0156: 2, | | |
| | | | | | | | H0373: 2, L0455: 2, | | |
| | | | | | | | H0529: 2, L0664: 2, | | |
| | | | | | | | H0144: 2, L0749: 2, | | |
| | | | | | | | L0592: 2, H0422: 2, | | |
| | | | | | | | L0002: 1, H0583: 1, | | |
| | | | | | | | H0656: 1, S0045: 1, | | |
| | | | | | | | S0046: 1, L0717: 1, | | |
| | | | | | | | H0261: 1, H0455: 1, | | |
| | | | | | | | H0013: 1, H0575: 1, | | |
| | | | | | | | T0082: 1, S0665: 1, | | |
| | | | | | | | S0346: 1, H0581: 1, | | |
| | | | | | | | H0251: 1, H0046: 1, | | |
| | | | | | | | H0009: 1, H0050: 1, | | |
| | | | | | | | H0014: 1, T0010: 1, | | |
| | | | | | | | S0003: 1, S0214: 1, | | |
| | | | | | | | S0366: 1, H0316: 1, | | |
| | | | | | | | H0598: 1, L0351: 1, | | |
| | | | | | | | S0150: 1, L0643: 1, | | |
| | | | | | | | L0764: 1, L0662: 1, | | |
| | | | | | | | L0794: 1, L0805: 1, | | |
| | | | | | | | L0653: 1, L0659: 1, | | |
| | | | | | | | L0666: 1, L0665: 1, | | |
| | | | | | | | H0539: 1, H0521: 1, | | |
| | | | | | | | S0146: 1, H0436: 1, | | |
| | | | | | | | H0478: 1, H0345: 1, | | |
| | | | | | | | L0745: 1, L0758: 1, | | |
| | | | | | | | L0588: 1, L0366: 1, | | |
| | | | | | | | S0026: 1, H0667: 1, | | |
| | | | | | | | S0194: 1, H0542: 1, | | |
| | | | | | | | H0677: 1 and S0446: 1. | | |
| | | 964235 | 599 | 2-2053 | 1197 | Gln-12 to His-20, | | | |
| | | | | | | Val-34 to Tyr-39, | | | |
| | | | | | | Asn-54 to Asn-59, | | | |
| | | | | | | Asp-105 to Gly-110, | | | |
| | | | | | | Gly-247 to Lys-256, | | | |
| | | | | | | Gln-314 to Gly-320, | | | |
| | | | | | | Arg-359 to Ser-366, | | | |
| | | | | | | Arg-420 to Gly-428, | | | |
| | | | | | | Ala-558 to Tyr-563, | | | |
| | | | | | | Leu-574 to Pro-579, | | | |
| | | | | | | Arg-592 to Phe-597, | | | |
| | | | | | | Ala-621 to Arg-630, | | | |
| | | | | | | Pro-636 to His-641. | | | |
| 314 | HHFCK09 | 965304 | 324 | 2692-389 | 922 | Tyr-47 to Glu-58, | AR089: 3, AR061: 2 | | |
| | | | | | | Lys-70 to Gly-77, | L0666: 8, L0439: 6, | | |
| | | | | | | Pro-121 to Leu-126, | H0253: 5, H0046: 4, | | |
| | | | | | | Leu-150 to Leu-158, | L0769: 4, H0295: 3, | | |
| | | | | | | Asn-166 to Glu-171, | H0255: 3, L0747: 3, | | |
| | | | | | | Arg-417 to Ser-425, | L0756: 3, L0779: 3, | | |
| | | | | | | Phe-465 to Cys-473, | H0657: 2, H0618: 2, | | |
| | | | | | | Ser-485 to Asn-492, | H0318: 2, H0622: 2, | | |
| | | | | | | Ser-497 to Ala-504, | H0068: 2, L0667: 2, | | |
| | | | | | | Gln-531 to Trp-537, | L0772: 2, L0776: 2, | | |
| | | | | | | Asp-557 to Glu-562. | L0663: 2, H0520: 2, | | |
| | | | | | | | H0593: 2, H0670: 2, | | |
| | | | | | | | H0521: 2, L0750: 2, | | |
| | | | | | | | L0759: 2, L0593: 2, | | |
| | | | | | | | L0601: 2, S0116: 1, | | |
| | | | | | | | H0341: 1, S0212: 1, | | |
| | | | | | | | H0306: 1, H0402: 1, | | |
| | | | | | | | L0617: 1, S0358: 1, | | |
| | | | | | | | H0609: 1, H0592: 1, | | |
| | | | | | | | H0333: 1, T0040: 1, | | |
| | | | | | | | H0013: 1, H0635: 1, | | |
| | | | | | | | H0575: 1, H0036: 1, | | |
| | | | | | | | H0581: 1, H0123: 1, | | |
| | | | | | | | H0050: 1, H0012: 1, | | |
| | | | | | | | H0071: 1, T0010: 1, | | |
| | | | | | | | H0687: 1, H0290: 1, | | |
| | | | | | | | H0617: 1, H0606: 1, | | |
| | | | | | | | H0038: 1, H0487: 1, | | |
| | | | | | | | H0494: 1, H0334: 1, | | |
| | | | | | | | S0150: 1, H0647: 1, | | |
| | | | | | | | S0142: 1, L0640: 1, | | |
| | | | | | | | L0639: 1, L0637: 1, | | |
| | | | | | | | L0641: 1, L0768: 1, | | |
| | | | | | | | L0649: 1, L0514: 1, | | |
| | | | | | | | L0659: 1, L0783: 1, | | |
| | | | | | | | L0788: 1, L0664: 1, | | |
| | | | | | | | L0665: 1, L0438: 1, | | |
| | | | | | | | H0547: 1, H0435: 1, | | |
| | | | | | | | H0522: 1, H0696: 1, | | |
| | | | | | | | S0404: 1, H0478: 1, | | |
| | | | | | | | L0742: 1, L0740: 1, | | |
| | | | | | | | L0749: 1, L0758: 1, | | |
| | | | | | | | S0434: 1, S0194: 1, | | |
| | | | | | | | H0422: 1 and H0506: 1. | | |
| 315 | HCOOZ11 | 1110364 | 325 | 89-943 | 923 | Asp-43 to Glu-48. | AR089: 15, AR061: 5 | | |
| | | | | | | | H0662: 2, H0670: 1, | | |
| | | | | | | | L0756: 1 and L0759: 1. | | |
| | | 965306 | 600 | 89-592 | 1198 | Asp-43 to Glu-48. | | | |
| 316 | HDPPO35 | 1119032 | 326 | 72-1202 | 924 | Lys-7 to Gly-69, | AR089: 1, AR061: 0 | | |
| | | | | | | Lys-82 to Lys-88, | H0521: 15, H0638: 5, | | |
| | | | | | | Ser-94 to Asp-112, | H0580: 5, H0271: 5, | | |
| | | | | | | Ala-126 to Asp-131, | H0641: 5, H0560: 4, | | |
| | | | | | | Tyr-134 to Ser-140, | H0090: 3, H0591: 3, | | |
| | | | | | | Ser-147 to Phe-156, | L0766: 3, H0542: 3, | | |
| | | | | | | Asp-159 to Ser-165, | H0543: 3, H0586: 2, | | |
| | | | | | | Thr-176 to Asp-186, | H0497: 2, H0581: 2, | | |
| | | | | | | Glu-230 to Leu-250, | L0655: 2, H0518: 2, | | |
| | | | | | | Glu-291 to Arg-298, | H0522: 2, L0754: 2, | | |
| | | | | | | Gln-313 to Glu-320, | L0747: 2, H0657: 1, | | |
| | | | | | | Asn-331 to Gly-343, | H0393: 1, H0431: 1, | | |
| | | | | | | Ser-348 to Leu-363. | H0250: 1, H0635: 1, | | |
| | | | | | | | L0021: 1, H0014: 1, | | |
| | | | | | | | H0179: 1, H0416: 1, | | |
| | | | | | | | H0488: 1, L0475: 1, | | |
| | | | | | | | H0359: 1, H0625: 1, | | |
| | | | | | | | S0426: 1, L0598: 1, | | |
| | | | | | | | L0667: 1, L0803: 1, | | |
| | | | | | | | L0804: 1, L0775: 1, | | |
| | | | | | | | L0651: 1, L0659: 1, | | |
| | | | | | | | L0792: 1, L0663: 1, | | |
| | | | | | | | S0428: 1, H0672: 1, | | |
| | | | | | | | H0555: 1, H0436: 1, | | |
| | | | | | | | L0779: 1, H0445: 1 and | | |
| | | | | | | | S0424: 1. | | |
| | | 966248 | 601 | 72-1202 | 1199 | Lys-7 to Gly-69, | | | |
| | | | | | | Lys-82 to Lys-88, | | | |
| | | | | | | Ser-94 to Asp-112, | | | |
| | | | | | | Ala-126 to Asp-131, | | | |
| | | | | | | Tyr-134 to Ser-140, | | | |
| | | | | | | Ser-147 to Phe-156, | | | |
| | | | | | | Asp-159 to Ser-165, | | | |
| | | | | | | Thr-176 to Asp-186, | | | |
| | | | | | | Glu-230 to Leu-250, | | | |
| | | | | | | Glu-291 to Arg-298, | | | |
| | | | | | | Gln-313 to Glu-320, | | | |
| | | | | | | Asn-331 to Gly-343, | | | |
| | | | | | | Ser-348 to Leu-363. | | | |
| 317 | HLWDZ53 | 1157542 | 327 | 2-1126 | 925 | | AR089: 5, AR061: 2 | | |
| | | | | | | | L0439: 13, L0752: 4, | | |
| | | | | | | | L0015: 3, H0144: 2, | | |
| | | | | | | | L0438: 2, L0742: 2, | | |
| | | | | | | | L0747: 2, L0758: 2, | | |
| | | | | | | | H0556: 1, L0785: 1, | | |
| | | | | | | | S0001: 1, H0664: 1, | | |
| | | | | | | | H0580: 1, H0486: 1, | | |
| | | | | | | | T0060: 1, H0253: 1, | | |
| | | | | | | | S0010: 1, H0009: 1, | | |
| | | | | | | | H0178: 1, H0564: 1, | | |
| | | | | | | | L0471: 1, S0051: 1, | | |
| | | | | | | | T0010: 1, H0553: 1, | | |
| | | | | | | | H0412: 1, L0370: 1, | | |
| | | | | | | | L0763: 1, L0768: 1, | | |
| | | | | | | | L0794: 1, L0806: 1, | | |
| | | | | | | | L0776: 1, L0657: 1, | | |
| | | | | | | | L0666: 1, H0520: 1, | | |
| | | | | | | | S0126: 1, H0682: 1, | | |
| | | | | | | | H0659: 1, H0187: 1, | | |
| | | | | | | | L0749: 1, L0755: 1 and | | |
| | | | | | | | H0445: 1. | | |
| | | 968602 | 602 | 2-1126 | 1200 | | | | |
| 318 | HEOPL36 | 1197910 | 328 | 100-501 | 926 | Gly-11 to Thr-16, | AR089: 18, AR061: 5 | | |
| | | | | | | Ser-35 to Ser-56, | L0740: 11, L0439: 9, | | |
| | | | | | | Thr-58 to Ser-73, | L0748: 8, H0616: 5, | | |
| | | | | | | Tyr-85 to Asp-91, | L0666: 5, L0601: 5, | | |
| | | | | | | Glu-100 to Glu-109. | S0444: 4, L0776: 4, | | |
| | | | | | | | L0659: 4, L0744: 4, | | |
| | | | | | | | L0747: 4, L0749: 4, | | |
| | | | | | | | L0755: 4, H0457: 3, | | |
| | | | | | | | L0774: 3, L0750: 3, | | |
| | | | | | | | H0624: 2, T0002: 2, | | |
| | | | | | | | S0116: 2, S0358: 2, | | |
| | | | | | | | H0550: 2, T0040: 2, | | |
| | | | | | | | H0013: 2, H0599: 2, | | |
| | | | | | | | H0050: 2, H0673: 2, | | |
| | | | | | | | H0038: 2, H0040: 2, | | |
| | | | | | | | H0494: 2, L0770: 2, | | |
| | | | | | | | L0662: 2, L0364: 2, | | |
| | | | | | | | L0375: 2, L0809: 2, | | |
| | | | | | | | L0438: 2, H0547: 2, | | |
| | | | | | | | L0754: 2, L0756: 2, | | |
| | | | | | | | L0752: 2, L0731: 2, | | |
| | | | | | | | L0758: 2, L0485: 2, | | |
| | | | | | | | S0040: 1, H0583: 1, | | |
| | | | | | | | H0650: 1, H0657: 1, | | |
| | | | | | | | H0341: 1, H0663: 1, | | |
| | | | | | | | H0580: 1, H0619: 1, | | |
| | | | | | | | L0717: 1, H0574: 1, | | |
| | | | | | | | H0052: 1, H0263: 1, | | |
| | | | | | | | H0009: 1, H0172: 1, | | |
| | | | | | | | H0024: 1, T0010: 1, | | |
| | | | | | | | H0510: 1, H0644: 1, | | |
| | | | | | | | S0036: 1, H0551: 1, | | |
| | | | | | | | H0264: 1, H0488: 1, | | |
| | | | | | | | H0056: 1, H0100: 1, | | |
| | | | | | | | L0564: 1, T0041: 1, | | |
| | | | | | | | H0652: 1, S0344: 1, | | |
| | | | | | | | S0002: 1, L0763: 1, | | |
| | | | | | | | L0638: 1, L0761: 1, | | |
| | | | | | | | L0372: 1, L0643: 1, | | |
| | | | | | | | L0764: 1, L0768: 1, | | |
| | | | | | | | L0381: 1, L0775: 1, | | |
| | | | | | | | L0526: 1, L0782: 1, | | |
| | | | | | | | L0663: 1, L0665: 1, | | |
| | | | | | | | H0703: 1, H0520: 1, | | |
| | | | | | | | H0435: 1, H0521: 1, | | |
| | | | | | | | S0044: 1, L0751: 1, | | |
| | | | | | | | L0757: 1, L0759: 1, | | |
| | | | | | | | H0445: 1, L0584: 1, | | |
| | | | | | | | L0608: 1 and H0506: 1. | | |
| | | 968826 | 603 | 85-486 | 1201 | Gly-11 to Thr-16, | | | |
| | | | | | | Ser-35 to Ser-56, | | | |
| | | | | | | Thr-58 to Ser-73, | | | |
| | | | | | | Tyr-85 to Asp-91, | | | |
| | | | | | | Glu-100 to Glu-109. | | | |
| 319 | HMCFS02 | 1152252 | 329 | 3-734 | 927 | Leu-42 to Gln-49, | AR061: 2, AR089: 0 | | |
| | | | | | | Gln-59 to Thr-65, | L0766: 10, L0794: 7, | | |
| | | | | | | Pro-119 to Lys-128, | L0758: 7, L0805: 6, | | |
| | | | | | | Asn-134 to Phe-140, | L0751: 4, L0754: 4, | | |
| | | | | | | Arg-150 to Phe-155, | L0803: 3, L0483: 2, | | |
| | | | | | | Asp-205 to Gly-212. | L0764: 2, L0659: 2, | | |
| | | | | | | | L0809: 2, L0790: 2, | | |
| | | | | | | | L0666: 2, L0755: 2, | | |
| | | | | | | | L0599: 2, H0170: 1, | | |
| | | | | | | | H0294: 1, H0583: 1, | | |
| | | | | | | | H0656: 1, S0282: 1, | | |
| | | | | | | | H0255: 1, S0420: 1, | | |
| | | | | | | | H0618: 1, H0688: 1, | | |
| | | | | | | | L0055: 1, S0344: 1, | | |
| | | | | | | | H0529: 1, L0761: 1, | | |
| | | | | | | | L0643: 1, L0645: 1, | | |
| | | | | | | | L0804: 1, L0806: 1, | | |
| | | | | | | | L0653: 1, L0776: 1, | | |
| | | | | | | | L0629: 1, L0636: 1, | | |
| | | | | | | | L0788: 1, L0789: 1, | | |
| | | | | | | | L0791: 1, L0665: 1, | | |
| | | | | | | | S0428: 1, H0702: 1, | | |
| | | | | | | | L0438: 1, S0330: 1, | | |
| | | | | | | | H0539: 1, H0478: 1, | | |
| | | | | | | | L0749: 1, L0750: 1, | | |
| | | | | | | | L0779: 1, L0731: 1, | | |
| | | | | | | | L0757: 1, H0665: 1 and | | |
| | | | | | | | H0423: 1. | | |
| | | 969326 | 604 | 2-496 | 1202 | Arg-3 to Lys-20, | | | |
| | | | | | | Phe-22 to Ser-28, | | | |
| | | | | | | Leu-50 to Gln-57. | | | |
| 320 | HDPSR15 | 1194752 | 330 | 178-1167 | 928 | Pro-26 to Leu-34, | AR061: 2, AR089: 2 | | |
| | | | | | | His-42 to Asn-51, | L0759: 12, L0439: 11, | | |
| | | | | | | Phe-154 to Pro-162, | L0766: 7, L0775: 5, | | |
| | | | | | | His-237 to Asp-246, | H0521: 5, L0755: 5, | | |
| | | | | | | Pro-263 to Lys-268, | L0748: 4, L0756: 4, | | |
| | | | | | | Lys-277 to Asp-282, | L0777: 4, L0731: 4, | | |
| | | | | | | Pro-285 to Leu-295, | L0581: 4, L0619: 3, | | |
| | | | | | | Pro-305 to Asp-312. | L0666: 3, L0779: 3, | | |
| | | | | | | | L0757: 3, L0588: 3, | | |
| | | | | | | | S0418: 2, L0618: 2, | | |
| | | | | | | | H0580: 2, L0055: 2, | | |
| | | | | | | | L0769: 2, L0773: 2, | | |
| | | | | | | | L0774: 2, L0791: 2, | | |
| | | | | | | | L0747: 2, L0750: 2, | | |
| | | | | | | | H0265: 1, H0663: 1, | | |
| | | | | | | | S0356: 1, H0208: 1, | | |
| | | | | | | | H0370: 1, H0108: 1, | | |
| | | | | | | | H0575: 1, H0618: 1, | | |
| | | | | | | | H0544: 1, H0545: 1, | | |
| | | | | | | | S0050: 1, H0510: 1, | | |
| | | | | | | | H0286: 1, H0031: 1, | | |
| | | | | | | | H0644: 1, H0068: 1, | | |
| | | | | | | | H0135: 1, L0564: 1, | | |
| | | | | | | | H0494: 1, L0475: 1, | | |
| | | | | | | | H0396: 1, S0144: 1, | | |
| | | | | | | | S0002: 1, S0426: 1, | | |
| | | | | | | | L0763: 1, L0761: 1, | | |
| | | | | | | | L0642: 1, L0764: 1, | | |
| | | | | | | | L0662: 1, L0768: 1, | | |
| | | | | | | | L0806: 1, L0661: 1, | | |
| | | | | | | | L0659: 1, L0367: 1, | | |
| | | | | | | | L0663: 1, H0519: 1, | | |
| | | | | | | | H0435: 1, H0658: 1, | | |
| | | | | | | | S3014: 1, L0751: 1, | | |
| | | | | | | | L0749: 1, L0603: 1, | | |
| | | | | | | | H0665: 1 and H0542: 1. | | |
| | | 969666 | 605 | 168-785 | 1203 | Pro-26 to Leu-34, | | | |
| | | | | | | His-42 to Asn-51. | | | |
| 321 | HNTAV78 | 1217231 | 331 | 1104-697 | 929 | Pro-1 to Lys-6. | AR054: 10, AR089: 2, | | |
| | | | | | | | AR061: 1, AR051: 1, | | |
| | | | | | | | AR050: 1 | | |
| | | | | | | | H0305: 1, H0580: 1, | | |
| | | | | | | | H0428: 1, L0803: 1, | | |
| | | | | | | | L0809: 1 and H0519: 1. | | |
| | | 971315 | 606 | 3-266 | 1204 | Glu-52 to Leu-58, | | | |
| | | | | | | Arg-63 to Lys-71, | | | |
| | | | | | | Arg-83 to Val-88. | | | |
| 322 | HFKDR14 | 1145842 | 332 | 3-1319 | 930 | Ala-2 to Pro-9, | AR061: 3, AR089: 2 | | |
| | | | | | | Val-22 to Gly-28. | L0792: 2, H0012: 1, | | |
| | | | | | | | H0100: 1, L0663: 1, | | |
| | | | | | | | L0756: 1 and L0780: 1. | | |
| | | 974255 | 607 | 15-1733 | 1205 | Ala-5 to Gly-18. | | | |
| 323 | HDPBI30 | 974711 | 333 | 182-1312 | 931 | Asp-1 to Asn-10. | AR051: 3, AR050: 1, | | |
| | | | | | | | AR089: 1, AR061: 0 | | |
| | | | | | | | H0521: 3, H0656: 2, | | |
| | | | | | | | H0635: 2, H0549: 1, | | |
| | | | | | | | H0050: 1, H0413: 1, | | |
| | | | | | | | H0641: 1, L0387: 1, | | |
| | | | | | | | H0436: 1 and H0423: 1. | | |
| 324 | HODFF88 | 1094875 | 334 | 14-544 | 932 | His-8 to Gly-18, | AR054: 34, AR051: | | |
| | | | | | | Glu-150 to Leu-167. | 29, AR050: 23, AR089: | | |
| | | | | | | | 4, AR061: 4 | | |
| | | | | | | | H0615: 1 | | |
| | | 974911 | 608 | 14-544 | 1206 | His-8 to Gly-18, | | | |
| | | | | | | Glu-150 to Leu-167. | | | |

[0040] The first column in Table 1A provides the gene number in the application corresponding to the clone identifier. The second column in Table 1A provides a unique “Clone ID NO:Z” for a cDNA clone related to each contig sequence disclosed in Table 1A. This clone ID references the cDNA clone which contains at least the 5′ most sequence of the assembled contig and at least a portion of SEQ ID NO:X was determined by directly sequencing the referenced clone. The reference clone may have more sequence than described in the sequence listing or the clone may have less. In the vast majority of cases, however, the clone is believed to encode a full-length polypeptide. In the case where a clone is not full-length, a full-length cDNA can be obtained by methods described elsewhere herein.

[0041] The third column in Table 1A provides a unique “Contig ID” identification for each contig sequence. The fourth column provides the “SEQ ID NO:” identifier for each of the contig polynucleotide sequences disclosed in Table 1A. The fifth column, “ORF (From-To)”, provides the location (i.e., nucleotide position numbers) within the polynucleotide sequence “SEQ ID NO:X” that delineate the preferred open reading frame (ORF) shown in the sequence listing and referenced in Table 1A, column 6, as SEQ ID NO:Y. Where the nucleotide position number “To” is lower than the nucleotide position number “From”, the preferred ORF is the reverse complement of the referenced polynucleotide sequence.

[0042] The sixth column in Table 1A provides the corresponding SEQ ID NO:Y for the polypeptide sequence encoded by the preferred ORF delineated in column 5. In one embodiment, the invention provides an amino acid sequence comprising, or alternatively consisting of, a polypeptide encoded by the portion of SEQ ID NO:X delineated by “ORF (From-To)”. Also provided are polynucleotides encoding such amino acid sequences and the complementary strand thereto.

[0043] Column 7 in Table 1A lists residues comprising epitopes contained in the polypeptides encoded by the preferred ORF (SEQ ID NO:Y), as predicted using the algorithm of Jameson and Wolf, (1988) Comp. Appl. Biosci. 4:181-186. The Jameson-Wolf antigenic analysis was performed using the computer program PROTEAN (Version 3.11 for the Power MacIntosh, DNASTAR, Inc., 1228 South Park Street Madison, Wis.). In specific embodiments, polypeptides of the invention comprise, or alternatively consist of, at least one, two, three, four, five or more of the predicted epitopes as described in Table 1A. It will be appreciated that depending on the analytical criteria used to predict antigenic determinants, the exact address of the determinant may vary slightly.

[0044] Column 8 in Table 1A provides an expression profile and library code: count for each of the contig sequences (SEQ ID NO:X) disclosed in Table 1A, which can routinely be combined with the information provided in Table 4 and used to determine the tissues, cells, and/or cell line libraries which predominantly express the polynucleotides of the invention. The first number in column 8 (preceding the colon), represents the tissue/cell source identifier code corresponding to the code and description provided in Table 4. For those identifier codes in which the first two letters are not “AR”, the second number in column 8 (following the colon) represents the number of times a sequence corresponding to the reference polynucleotide sequence was identified in the tissue/cell source. Those tissue/cell source identifier codes in which the first two letters are “AR” designate information generated using DNA array technology. Utilizing this technology, cDNAs were amplified by PCR and then transferred, in duplicate, onto the array. Gene expression was assayed through hybridization of first strand cDNA probes to the DNA array. cDNA probes were generated from total RNA extracted from a variety of different tissues and cell lines. Probe synthesis was performed in the presence of ³³P dCTP, using oligo(dT) to prime reverse transcription. After hybridization, high stringency washing conditions were employed to remove non-specific hybrids from the array. The remaining signal, emanating from each gene target, was measured using a Phosphorimager. Gene expression was reported as Phosphor Stimulating Luminescence (PSL) which reflects the level of phosphor signal generated from the probe hybridized to each of the gene targets represented on the array. A local background signal subtraction was performed before the total signal generated from each array was used to normalize gene expression between the different hybridizations. The value presented after “[array code]:” represents the mean of the duplicate values, following background subtraction and probe normalization. One of skill in the art could routinely use this information to identify normal and/or diseased tissue(s) which show a predominant expression pattern of the corresponding polynucleotide of the invention or to identify polynucleotides which show predominant and/or specific tissue and/or cell expression.

[0045] Column 9 in Table 1A provides a chromosomal map location for certain polynucleotides of the invention. Chromosomal location was determined by finding exact matches to EST and cDNA sequences contained in the NCBI (National Center for Biotechnology Information) UniGene database. Each sequence in the UniGene database is assigned to a “cluster”; all of the ESTs, cDNAs, and STSs in a cluster are believed to be derived from a single gene. Chromosomal mapping data is often available for one or more sequence(s) in a UniGene cluster; this data (if consistent) is then applied to the cluster as a whole. Thus, it is possible to infer the chromosomal location of a new polynucleotide sequence by determining its identity with a mapped UniGene cluster.

[0046] A modified version of the computer program BLASTN (Altshul et al., J. Mol. Biol. 215:403-410 (1990); and Gish and States, Nat. Genet. 3:266-272 (1993)) was used to search the UniGene database for EST or cDNA sequences that contain exact or near-exact matches to a polynucleotide sequence of the invention (the ‘Query’). A sequence from the UniGene database (the ‘Subject’) was said to be an exact match if it contained a segment of 50 nucleotides in length such that 48 of those nucleotides were in the same order as found in the Query sequence. If all of the matches that met this criteria were in the same UniGene cluster, and mapping data was available for this cluster, it is indicated in Table 1A under the heading “Cytologic Band”. Where a cluster had been further localized to a distinct cytologic band, that band is disclosed; where no banding information was available, but the gene had been localized to a single chromosome, the chromosome is disclosed.

[0047] Once a presumptive chromosomal location was determined for a polynucleotide of the invention, an associated disease locus was identified by comparison with a database of diseases which have been experimentally associated with genetic loci. The database used was the Morbid Map, derived from OMIM™ (supra). If the putative chromosomal location of a polynucleotide of the invention (Query sequence) was associated with a disease in the Morbid Map database, an OMIM reference identification number was noted in column 10, Table 1A, labelled “OMIM Disease Reference(s)”. Table 5 is a key to the OMIM reference identification numbers (column 1), and provides a description of the associated disease in Column 2.

TABLE 1B

| Clone ID | SEQ ID | CONTIG | BAC ID: | SEQ ID | EXON |
|---|---|---|---|---|---|
| NO:Z | NO:X | ID: | A | NO:B | From-To |
| HCEPH71 | 14 | 522739 | AL365319 | 1207 | 1-494 |
| HCEPH71 | 14 | 522739 | AL390715 | 1208 | 1-494 |
| HLMDO95 | 43 | 928344 | AC020641 | 1209 | 1-591 |
| | | | | | 627-2046 |
| HTEAG49 | 54 | 954614 | AL390796 | 1210 | 1-1310 |
| HTEAG49 | 54 | 954614 | AL357045 | 1211 | 1-1310 |
| HTEAG49 | 54 | 954614 | AL390796 | 1212 | 1-627 |
| HTEAG49 | 54 | 954614 | AL357045 | 1213 | 1-627 |
| HACCH94 | 103 | 847143 | AL161458 | 1214 | 1-1140 |
| HACCH94 | 103 | 847143 | AL161458 | 1215 | 1-90 |
| | | | | | 5811-6312 |
| HFKLX38 | 113 | 880220 | AL136383 | 1216 | 1-32 |
| | | | | | 1288-1454 |
| | | | | | 1561-1646 |
| | | | | | 3840-4700 |
| | | | | | 5482-6798 |
| HTDAB17 | 117 | 890384 | AC011078 | 1217 | 1-297 |
| | | | | | 359-416 |
| | | | | | 3247-3653 |
| | | | | | 6083-6236 |
| | | | | | 9753-10036 |
| | | | | | 11128-11233 |
| | | | | | 12148-12514 |
| | | | | | 12635-13141 |
| | | | | | 15604-16463 |
| | | | | | 19071-19190 |
| | | | | | 19476-20232 |
| | | | | | 20321-20638 |
| | | | | | 21200-21594 |
| | | | | | 21959-22219 |
| | | | | | 23120-23362 |
| | | | | | 23467-24143 |
| | | | | | 24766-24853 |
| | | | | | 25725-26143 |
| | | | | | 26310-26455 |
| | | | | | 27545-30619 |
| | | | | | 30708-31169 |
| HTLCA95 | 142 | 911655 | AC012616 | 1218 | 1-1151 |
| HTLCA95 | 142 | 911655 | AC012616 | 1219 | 1-284 |
| HHEHC53 | 152 | 921783 | AC009427 | 1220 | 1-100 |
| | | | | | 1854-1942 |
| | | | | | 3236-3463 |
| | | | | | 4629-4868 |
| | | | | | 5054-5181 |
| | | | | | 5371-5476 |
| | | | | | 5851-5953 |
| | | | | | 6104-6149 |
| | | | | | 6509-6612 |
| | | | | | 7131-8415 |
| | | | | | 8429-8492 |
| | | | | | 8638-8748 |
| | | | | | 8975-9440 |
| | | | | | 9835-10490 |
| | | | | | 10606-10899 |
| | | | | | 11149-11282 |
| | | | | | 11382-11881 |
| | | | | | 12023-12075 |
| | | | | | 12172-12315 |
| | | | | | 12496-12551 |
| | | | | | 12638-12706 |
| | | | | | 12827-12994 |
| | | | | | 13077-13630 |
| HHEHC53 | 152 | 921783 | AC009427 | 1221 | 1-428 |
| HHEHC53 | 152 | 921783 | AC009427 | 1222 | 1-388 |
| | | | | | 466-526 |
| | | | | | 698-906 |
| | | | | | 1023-1922 |
| HELHF07 | 196 | 949067 | AC073669 | 1223 | 1-597 |
| HELHF07 | 196 | 949067 | AC023605 | 1224 | 1-583 |
| HELHF07 | 196 | 949067 | AC074220 | 1225 | 1-362 |
| HELHF07 | 196 | 949067 | AC074220 | 1226 | 1-105 |
| HACAD35 | 199 | 949199 | AC007363 | 1227 | 1-98 |
| | | | | | 3271-3413 |
| | | | | | 4132-4357 |
| | | | | | 7030-7682 |
| | | | | | 11881-12001 |
| | | | | | 12874-13485 |
| HDTKQ14 | 254 | 886936 | AL359542 | 1228 | 1-140 |
| | | | | | 1249-4264 |
| HDTKQ14 | 254 | 886936 | AL359542 | 1229 | 1-499 |
| HDTKQ14 | 254 | 886936 | AL359542 | 1230 | 1-145 |
| HWAGS73 | 257 | 894404 | AL096870 | 1231 | 1-185 |
| | | | | | 393-1743 |
| | | | | | 1951-2118 |
| | | | | | 2229-2295 |
| | | | | | 2410-2906 |
| | | | | | 3043-3107 |
| | | | | | 3238-3519 |
| | | | | | 3594-3970 |
| HWAGS73 | 257 | 894404 | AL096870 | 1232 | 1-1080 |
| | | | | | 2072-2811 |
| HSYBX32 | 270 | 909846 | AC004084 | 1233 | 1-105 |
| | | | | | 839-1021 |
| | | | | | 2069-2302 |
| | | | | | 2470-2855 |
| | | | | | 3818-4265 |
| | | | | | 4371-4610 |
| | | | | | 4761-4810 |
| | | | | | 5364-5802 |
| | | | | | 5930-6517 |
| | | | | | 7073-7807 |
| | | | | | 8063-8618 |
| | | | | | 8636-8875 |
| | | | | | 9438-9537 |
| | | | | | 10568-10774 |
| | | | | | 10897-11025 |
| | | | | | 11718-12323 |
| | | | | | 13749-13849 |
| | | | | | 13978-14188 |
| | | | | | 14474-14554 |
| | | | | | 16489-16624 |
| | | | | | 16924-17019 |
| | | | | | 17239-17458 |
| | | | | | 17908-18185 |
| | | | | | 19014-19266 |
| | | | | | 19356-19451 |
| | | | | | 19620-19873 |
| | | | | | 19893-20920 |
| | | | | | 21092-21247 |
| | | | | | 21512-21579 |
| | | | | | 21621-21754 |
| | | | | | 22001-22831 |
| | | | | | 22992-23518 |
| | | | | | 23710-24370 |
| | | | | | 24426-24596 |
| | | | | | 25213-25493 |
| | | | | | 25661-26192 |
| | | | | | 26588-27433 |
| | | | | | 27598-27742 |
| | | | | | 28073-28199 |
| | | | | | 28359-28651 |
| | | | | | 28777-29249 |
| | | | | | 29379-29502 |
| | | | | | 29646-29794 |
| | | | | | 29833-30033 |
| | | | | | 30085-30630 |
| | | | | | 30702-32661 |
| | | | | | 33104-33374 |
| | | | | | 33383-33661 |
| | | | | | 33808-33871 |
| | | | | | 33978-37449 |
| | | | | | 37587-37754 |
| | | | | | 38296-38433 |
| | | | | | 38597-39343 |
| | | | | | 40047-40395 |
| | | | | | 40462-40743 |
| | | | | | 40938-41039 |
| | | | | | 41187-41634 |
| | | | | | 42504-42687 |
| | | | | | 42703-42850 |
| | | | | | 42929-43475 |
| HSYBX32 | 270 | 909846 | AC004951 | 1234 | 1-735 |
| | | | | | 991-1547 |
| HSYBX32 | 270 | 909846 | AC004084 | 1235 | 1-239 |
| HSYBX32 | 270 | 909846 | AC004084 | 1236 | 1-283 |
| HSYBX32 | 270 | 909846 | AC004951 | 1237 | 1-255 |
| HSYBX32 | 270 | 909846 | AC004951 | 1238 | 1-318 |
| HTLJC71 | 284 | 922923 | AC009516 | 1239 | 1-2009 |
| HTLJC71 | 284 | 922923 | AC007957 | 1240 | 1-1747 |
| HTLJC71 | 284 | 922923 | AC018751 | 1241 | 1-2009 |
| HTLJC71 | 284 | 922923 | AC023490 | 1242 | 1-2009 |
| HTLJC71 | 284 | 922923 | AC009516 | 1243 | 1-375 |
| HTLJC71 | 284 | 922923 | AC009516 | 1244 | 1-494 |
| HTLJC71 | 284 | 922923 | AC007957 | 1245 | 1-205 |
| HTLJC71 | 284 | 922923 | AC018751 | 1246 | 1-494 |
| HTLJC71 | 284 | 922923 | AC023490 | 1247 | 1-375 |
| HTLJC71 | 284 | 922923 | AC018751 | 1248 | 1-375 |
| HWMEV63 | 291 | 931154 | AC078816 | 1249 | 1-1574 |

[0048] Table 1B summarizes additional polynucleotides encompassed by the invention (including cDNA clones related to the sequences (Clone ID NO:Z), contig sequences (contig identifier (Contig ID:) contig nucleotide sequence identifiers (SEQ ID NO:X)), and genomic sequences (SEQ ID NO:B). The first column provides a unique clone identifier, “Clone ID NO:Z”, for a cDNA clone related to each contig sequence. The second column provides the sequence identifier, “SEQ ID NO:X”, for each contig sequence. The third column provides a unique contig identifier, “Contig ID:” for each contig sequence. The fourth column, provides a BAC identifier “BAC ID NO:A” for the BAC clone referenced in the corresponding row of the table. The fifth column provides the nucleotide sequence identifier, “SEQ ID NO:B” for a fragment of the BAC clone identified in column four of the corresponding row of the table. The sixth column, “Exon From-To”, provides the location (i.e., nucleotide position numbers) within the polynucleotide sequence of SEQ ID NO:B which delineate certain polynucleotides of the invention that are also exemplary members of polynucleotide sequences that encode polypeptides of the invention (e.g., polypeptides containing amino acid sequences encoded by the polynucleotide sequences delineated in column six, and fragments and variants thereof).

TABLE 2

| | | SEQ | | | | Score/ | | |
|---|---|---|---|---|---|---|---|---|
| Clone ID | Contig | ID | Analysis | | PFam/NR Accession | Percent | NT | NT |
| NO: Z | ID: | NO: X | Method | PFam/NR Description | Number | Identity | From | To |
| HTPAD46 | 503313 | 335 | HMMER | PFAM: Src homology | PF00018 | 4.14 | 160 | 186 |
| | | | 1.8 | domain 3 | | | | |
| HCWFF88 | 506577 | 336 | HMMER | PFAM: Src homology | PF00018 | 4.92 | 140 | 181 |
| | | | 1.8 | domain 3 | | | | |
| HSSAX53 | 507509 | 337 | HMMER | PFAM: Src homology | PF00018 | 4.36 | 266 | 331 |
| | | | 1.8 | domain 3 | | | | |
| HCEPH71 | 522739 | 14 | HMMER | PFAM: Src homology | PF00018 | 4.22 | 33 | 62 |
| | | | 1.8 | domain 3 | | | | |
| HTEDF74 | 522982 | 338 | HMMER | PFAM: C2 domain | PF00168 | 6.98 | 189 | 233 |
| | | | 1.8 | | | | | |
| HTTEK47 | 573649 | 339 | HMMER | PFAM: EF hand | PF00036 | 10.82 | 224 | 289 |
| | | | 1.8 | | | | | |
| | | | blastx.2 | DJ534K7.2 (novel | sp\|CAB92087\|CAB92087 | 100% | 11 | 301 |
| | | | | protein). | | 65% | 283 | 378 |
| | | | | | | 52% | 342 | 410 |
| HTOBE75 | 591896 | 340 | HMMER | PFAM: Sushi domain | PF00084 | 61.2 | 100 | 273 |
| | | | 2.1.1 | (SCR repeat) | | | | |
| HCFAT05 | 592118 | 341 | HMMER | PFAM: Ion transport | PF00520 | 106.1 | 137 | 361 |
| | | | 2.1.1 | protein | | | | |
| | | | blastx.2 | potassium channel protein | gb\|AAA59457.1\| | 67% | 134 | 427 |
| | | | | [Homo sapiens] | | 100% | 18 | 137 |
| | | | | | | 52% | 360 | 491 |
| HFIAH37 | 615597 | 342 | HMMER | PFAM: C2 domain | PF00168 | 4.22 | 241 | 291 |
| | | | 1.8 | | | | | |
| HFTDF15 | 657020 | 343 | HMMER | PFAM: Src homology | PF00018 | 4.85 | 168 | 203 |
| | | | 1.8 | domain 3 | | | | |
| HPFCU80 | 685294 | 344 | HMMER | PFAM: C2 domain | PF00168 | 4 | 261 | 296 |
| | | | 1.8 | | | | | |
| HSVAW49 | 689674 | 345 | HMMER | PFAM: Src homology | PF00018 | 36.33 | 77 | 169 |
| | | | 1.8 | domain 3 | | | | |
| | | | blastx.2 | (AF146277) adapter | gb\|AAD34595.1\|AF146277_1 | 97% | 65 | 166 |
| | | | | protein CMS [Homo | | | | |
| | | | | sapiens] | | | | |
| HWHQC94 | 1116463 | 23 | blastx.14 | (AC004472) P1.11659_3 | gi\|2984587\|gb\|AAC07985.1\| | 76% | 581 | 874 |
| | | | | [Homo sapiens] | | 41% | 476 | 547 |
| HWHQC94 | 715096 | 346 | HMMER | PFAM: C2 domain | PF00168 | 4.17 | 214 | 300 |
| | | | 1.8 | | | | | |
| | | | blastx.2 | Pig-o. | sp\|BAA96254\|BAA96254 | 64% | 1 | 627 |
| HRSMD49 | 723025 | 347 | HMMER | PFAM: Src homology | PF00018 | 4.76 | 199 | 270 |
| | | | 1.8 | domain 3 | | | | |
| HFTDY67 | 1151220 | 25 | blastx.14 | (AF182316) myoferlin | gi\|6731235\|gb\|AAF27176.1\| | 94% | 1368 | 52 |
| | | | | [Homo sapiens] | AF182316_1 | 92% | 42 | 1 |
| | | | | | | 33% | 201 | 94 |
| | | | | | | 42% | 63 | 1 |
| | | | | | | 26% | 201 | 145 |
| HFTDY67 | 745221 | 348 | HMMER | PFAM: C2 domain | PF00168 | 20.07 | 4 | 144 |
| | | | 1.8 | | | | | |
| | | | blastx.2 | Myoferlin. | sp\|AAF27177\|AAF27177 | 98% | 4 | 225 |
| | | | | | | 100% | 224 | 298 |
| | | | | | | 35% | 213 | 263 |
| HYABL89 | 786157 | 349 | HMMER | PFAM: C2 domain | PF00168 | 6.05 | 270 | 317 |
| | | | 1.8 | | | | | |
| HCUEV29 | 1137791 | 27 | blastx.14 | (AL110490) predicted | gi\|5824799\|emb\|CAB54442.1\| | 53% | 96 | 344 |
| | | | | using Genefinder | | 53% | 387 | 470 |
| | | | | [Caenorhabditis elegans] | | 64% | 6 | 47 |
| HCUEV29 | 816065 | 350 | HMMER | PFAM: EF hand | PF00036 | 31.87 | 143 | 229 |
| | | | 1.8 | | | | | |
| | | | blastx.2 | CG10641 PROTEIN. | sp\|Q9VJ26\|Q9VJ26 | 59% | 89 | 286 |
| | | | | | | 49% | 312 | 500 |
| HCESP56 | 827671 | 351 | HMMER | PFAM: EF hand | PF00036 | 11.86 | 240 | 317 |
| | | | 1.8 | | | | | |
| | | | blastx.2 | HYPOTHETICAL 27.4 KDA | sp\|Q9UJF6\|Q9UJF6 | 100% | 186 | 452 |
| | | | | PROTEIN | | | | |
| | | | | (FRAGMENT). | | | | |
| HLQDT35 | 839777 | 352 | HMMER | PFAM: Src homology | PF00018 | 3.85 | 342 | 419 |
| | | | 1.8 | domain 3 | | | | |
| | | | blastx.2 | (AK000579) unnamed | dbj\|BAA91269.1\| | 98% | 252 | 458 |
| | | | | protein product [Homo | | | | |
| | | | | sapiens] | | | | |
| HDPBS64 | 846624 | 30 | HMMER | PFAM: Thioredoxins | PF00085 | 116.87 | 173 | 493 |
| | | | 1.8 | | | | | |
| | | | blastx.2 | ZK973.11 protein. | sp\|AAF40013\|AAF40013 | 32% | 182 | 652 |
| HTBAB41 | 867287 | 353 | HMMER | PFAM: C2 domain | PF00168 | 5.32 | 89 | 157 |
| | | | 1.8 | | | | | |
| HTLGE31 | 870247 | 32 | HMMER | PFAM: Sugar (and other) | PF00083 | 21.4 | 5 | 115 |
| | | | 1.8 | transporters | | | | |
| HWLHK29 | 1152279 | 33 | blastx.14 | (AF181098) | gi\|5823558\|gb\|AAD53186.1\| | 27% | 474 | 602 |
| | | | | synaptotagmin IV | AF181098_1 | 29% | 198 | 371 |
| | | | | [Drosophila melanogaster] | | 30% | 77 | 166 |
| HWLHK29 | 876064 | 354 | HMMER | PFAM: C2 domain | PF00168 | 16.97 | 222 | 488 |
| | | | 1.8 | | | | | |
| HHEGG20 | 1106816 | 34 | blastx.14 | (AF084205) | gi\|3452473\|gb\|AAC71014.1\| | 84% | 3 | 971 |
| | | | | serine/threonine protein | | | | |
| | | | | kinase TAO1 [Rattus | | | | |
| | | | | norvegicus] | | | | |
| HHEGG20 | 894409 | 355 | HMMER | PFAM: Eukaryotic protein | PF00069 | 200.01 | 26 | 598 |
| | | | 1.8 | kinase domain | | | | |
| HDPRU43 | 1217035 | 35 | blastx.14 | PUTATIVE RASGAP- | sp\|O43374\|O43374 | 97% | 163 | 2460 |
| | | | | ACTIVATING-LIKE | | 100% | 52 | 174 |
| | | | | PROTEIN. | | | | |
| HDPRU43 | 909841 | 356 | HMMER | PFAM: C2 domain | PF00168 | 82.11 | 58 | 303 |
| | | | 1.8 | | | | | |
| HE8PK12 | 909884 | 357 | HMMER | PFAM: Src homology | PF00018 | 58.12 | 197 | 361 |
| | | | 1.8 | domain 3 | | | | |
| | | | blastx.2 | (AF136380) SH3P12 | gb\|AAD27647.1\|AF136380_1 | 82% | 59 | 367 |
| | | | | protein [Homo sapiens] | | | | |
| HE9HV92 | 1227519 | 37 | blastx.14 | DIFFERENTIATION | sp\|O97902\|O97902 | 53% | 1 | 336 |
| | | | | ENHANCING FACTOR 1. | | 64% | 820 | 1050 |
| | | | | | | 37% | 477 | 563 |
| | | | | | | 47% | 290 | 340 |
| | | | | | | 36% | 766 | 873 |
| HE9HV92 | 911510 | 358 | HMMER | PFAM: Src homology | PF00018 | 55.67 | 869 | 1042 |
| | | | 1.8 | domain 3 | | | | |
| | | | blastx.2 | DIFFERENTIATION | sp\|O97902\|O97902 | 52% | 707 | 1048 |
| | | | | ENHANCING FACTOR 1. | | 44% | 8 | 418 |
| | | | | | | 37% | 475 | 561 |
| | | | | | | 35% | 713 | 871 |
| HOHCE47 | 911566 | 359 | HMMER | PFAM: Eukaryotic protein | PF00069 | 79.42 | 211 | 423 |
| | | | 1.8 | kinase domain | | | | |
| HSDII69 | 917180 | 360 | HMMER | PFAM: Src homology | PF00018 | 4.09 | 382 | 429 |
| | | | 1.8 | domain 3 | | | | |
| HKAKM10 | 1227639 | 40 | blastx.14 | NUCLEAR BODY | sp\|Q9QUQ8\|Q9QUQ8 | 88% | 9 | 2840 |
| | | | | ASSOCIATED KINASE | | | | |
| | | | | 2B. | | | | |
| HKAKM10 | 918685 | 361 | HMMER | PFAM: Eukaryotic protein | PF00069 | 31.4 | 8 | 127 |
| | | | 2.1.1 | kinase domain | | | | |
| HCEPU56 | 920347 | 362 | HMMER | PFAM: C2 domain | PF00168 | 3.93 | 243 | 293 |
| | | | 1.8 | | | | | |
| | | | blastx.2 | HYPOTHETICAL 27.3 KDA | sp\|O60362\|O60362 | 82% | 219 | 659 |
| | | | | PROTEIN. | | | | |
| HUSHB54 | 928054 | 42 | HMMER | PFAM: C2 domain | PF00168 | 20.52 | 275 | 355 |
| | | | 1.8 | | | | | |
| HLMDO95 | 928344 | 43 | HMMER | PFAM: 7 transmembrane | PF00001 | 43.25 | 220 | 369 |
| | | | 1.8 | receptor (rhodopsin | | | | |
| | | | | family) | | | | |
| | | | blastx.2 | Inflammation-related G | sp\|AAF91467\|AAF91467 | 51% | 112 | 375 |
| | | | | protein-coupled receptor | | 95% | 375 | 446 |
| | | | | EX33. | | | | |
| HHASQ32 | 928730 | 363 | HMMER | PFAM: Carnitate | PF00755 | 317 | 250 | 855 |
| | | | 2.1.1 | acyltransferase | | | | |
| HARAB87 | 1164340 | 45 | blastx.14 | neurotransmitter | gi\|914028\|gb\|AAB32806.1\| | 89% | 51 | 350 |
| | | | | transporter rB21a [rats, | | 83% | 349 | 549 |
| | | | | brain, Peptide, 616 aa] | | 90% | 16 | 45 |
| | | | | [Rattus sp.] | | | | |
| HARAB87 | 933441 | 364 | HMMER | PFAM: | PF00209 | 79.6 | 268 | 570 |
| | | | 2.1.1 | Sodium: neurotransmitter | | | | |
| | | | | symporter family | | | | |
| HTNGF69 | 933614 | 365 | HMMER | PFAM: C2 domain | PF00168 | 3.94 | 588 | 659 |
| | | | 1.8 | | | | | |
| HMSJL96 | 1154788 | 47 | blastx.14 | (AF104413) large tumor | gi\|4324434\|gb\|AAD16882.1\| | 80% | 1 | 1245 |
| | | | | suppressor 1 [Homo | | 86% | 1282 | 1371 |
| | | | | sapiens] | | 41% | 1085 | 1171 |
| HMSJL96 | 934483 | 366 | HMMER | PFAM: Eukaryotic protein | PF00069 | 26.49 | 199 | 363 |
| | | | 1.8 | kinase domain | | | | |
| HDTBT06 | 935404 | 367 | HMMER | PFAM: Actin | PF00022 | 110.8 | 514 | 903 |
| | | | 2.1.1 | | | | | |
| | | | blastx.2 | actin-related protein - fruit | pir\|S44028\|S44028 | 47% | 52 | 876 |
| | | | | fly (Drosophila | | | | |
| | | | | melanogaster) | | | | |
| HTTIE47 | 1165363 | 49 | blastx.14 | ZK550.2 [Caenorhabditis | gi\|3881745\|emb\|CAB05312.1\| | 43% | 188 | 382 |
| | | | | elegans] | | 30% | 398 | 544 |
| | | | | | | 34% | 559 | 627 |
| HTTIE47 | 941834 | 368 | HMMER | PFAM: Sugar (and other) | PF00083 | 32.12 | 295 | 522 |
| | | | 1.8 | transporters | | | | |
| | | | blastx.2 | predicted using | emb\|CAB01157.1\| | 38% | 151 | 537 |
| | | | | Genefinder; Similarity to | | | | |
| | | | | worm multidrug resistance | | | | |
| | | | | proteins [Caenorhabditis | | | | |
| | | | | elegans] | | | | |
| HHFBP47 | 946668 | 50 | HMMER | PFAM: Sugar (and other) | PF00083 | 25.74 | 696 | 370 |
| | | | 1.8 | transporters | | | | |
| | | | blastx.2 | (AL050350) dJ261K5.1 | emb\|CAB56524.1\| | 98% | 482 | 955 |
| | | | | (novel organic cation | | 95% | 135 | 461 |
| | | | | transporter (BAC ORF | | 100% | 38 | 139 |
| | | | | RG331P03)) [Homo | | 77% | 451 | 516 |
| | | | | sapiens] | | | | |
| HCCCC81 | 1083553 | 51 | blastx.14 | (AL022605) putative | gi\|3080435\|emb\|CAA18752.1\| | 50% | 125 | 304 |
| | | | | protein [Arabidopsis | | 68% | 428 | 514 |
| | | | | thaliana] | | 56% | 302 | 397 |
| | | | | | | 29% | 588 | 689 |
| | | | | | | 38% | 514 | 591 |
| | | | | | | 50% | 334 | 369 |
| HCCCC81 | 949062 | 369 | HMMER | PFAM: | PF00202 | 178.37 | 187 | 816 |
| | | | 1.8 | Aminotransferases class- | | | | |
| | | | | III pyridoxal-phosphate | | | | |
| | | | blastx.2 | hypothetical protein | pir\|T25848\|T25848 | 46% | 190 | 879 |
| | | | | T01B11.2 - | | | | |
| | | | | Caenorhabditis elegans | | | | |
| HPJEV71 | 949153 | 370 | HMMER | PFAM: von Willebrand | PF00092 | 47.98 | 866 | 1375 |
| | | | 1.8 | factor type A domain | | | | |
| | | | blastx.2 | CDNA FLJ10601 FIS, | sp\|BAA91707\|BAA91707 | 53% | 974 | 1534 |
| | | | | CLONE NT2RP2005000. | | | | |
| HTEIL07 | 1136121 | 53 | blastx.14 | caltractin [Giardia | gi\|1399341\|gb\|AAB05594.1\| | 28% | 961 | 1128 |
| | | | | intestinalis] | | 28% | 646 | 792 |
| HTEIL07 | 953803 | 371 | HMMER | PFAM: EF hand | PF00036 | 11.27 | 192 | 263 |
| | | | 1.8 | | | | | |
| | | | blastx.2 | Hypothetical 41.3 kDa | sp\|CAB91065\|CAB91065 | 79% | 57 | 392 |
| | | | | protein. | | | | |
| HTEAG49 | 954614 | 54 | HMMER | PFAM: Src homology | PF00018 | 4.51 | 312 | 238 |
| | | | 1.8 | domain 3 | | | | |
| HSLCF96 | 637670 | 55 | HMMER | PFAM: Sugar (and other) | PF00083 | 10.78 | 415 | 576 |
| | | | 1.8 | transporters | | | | |
| | | | blastx.2 | (AE000352) putative | gb\|AAC75728.1\| | 94% | 415 | 1179 |
| | | | | transport protein | | 100% | 297 | 413 |
| | | | | [Escherichia coli] | | 70% | 1101 | 1211 |
| | | | | | | 20% | 409 | 600 |
| | | | | | | 26% | 1021 | 1179 |
| HSLCF96 | 954777 | 372 | HMMER | PFAM: Sugar (and other) | PF00083 | 30.03 | 1296 | 1015 |
| | | | 1.8 | transporters | | | | |
| | | | blastx.2 | (AE000352) putative | gb\|AAC75728.1\| | 96% | 303 | 1127 |
| | | | | transport protein | | 91% | 1147 | 1215 |
| | | | | [Escherichia coli] | | | | |
| HNHCI32 | 861673 | 56 | HMMER | PFAM: 7 transmembrane | PF00001 | 133.17 | 195 | 545 |
| | | | 1.8 | receptor (rhodopsin | | | | |
| | | | | family) | | | | |
| | | | blastx.2 | G protein-coupled | sp\|AAF27279\|AAF27279 | 100% | 189 | 551 |
| | | | | receptor 57. | | 100% | 112 | 186 |
| | | | | | | 100% | 56 | 112 |
| HNHCI32 | 956105 | 373 | HMMER | PFAM: 7 transmembrane | PF00001 | 133.17 | 951 | 601 |
| | | | 1.8 | receptor (rhodopsin | | | | |
| | | | | family) | | | | |
| | | | blastx.2 | (AF112461) G protein- | gb\|AAF27279.1\|AF112461_1 | 100% | 555 | 917 |
| | | | | coupled receptor 57 | | 100% | 478 | 552 |
| | | | | [Homo sapiens] | | 100% | 422 | 478 |
| HPMFL08 | 959569 | 374 | HMMER | PFAM: Src homology | PF00018 | 4.97 | 209 | 238 |
| | | | 1.8 | domain 3 | | | | |
| HTXRA13 | 959622 | 58 | HMMER | PFAM: C2 domain | PF00168 | 51.3 | 540 | 809 |
| | | | 2.1.1 | | | | | |
| | | | blastx.2 | GRANUPHILIN-A. | sp\|Q9R0Q1\|Q9R0Q1 | 42% | 429 | 1091 |
| HCE3H71 | 1197898 | 59 | blastx.14 | SEIZURE-RELATED | sp\|Q62223\|Q62223 | 89% | 413 | 961 |
| | | | | PROTEIN 6 TYPE 2 | | 95% | 12 | 413 |
| | | | | PRECURSOR. | | 27% | 126 | 266 |
| | | | | | | 34% | 150 | 263 |
| | | | | | | 56% | 363 | 410 |
| | | | | | | 39% | 365 | 448 |
| | | | | | | 41% | 216 | 266 |
| | | | | | | 43% | 273 | 320 |
| | | | | | | 36% | 383 | 448 |
| | | | | | | 46% | 410 | 448 |
| | | | | | | 57% | 410 | 451 |
| HCE3H71 | 961681 | 375 | HMMER | PFAM: Sushi domain | PE00084 | 79.2 | 317 | 496 |
| | | | 2.1.1 | (SCR repeat) | | | | |
| | | | blastx.2 | seizure-related protein | pir\|I52657\|I52657 | 83% | 5 | 685 |
| | | | | SEZ-6 precursor - mouse | | 64% | 565 | 957 |
| | | | | | | 30% | 98 | 496 |
| | | | | | | 48% | 929 | 1000 |
| HUTSF11 | 966029 | 376 | HMMER | PFAM: Eukaryotic protein | PF00069 | 27.74 | 3 | 104 |
| | | | 1.8 | kinase domain | | | | |
| HTEGI48 | 1021235 | 61 | blastx.14 | (AF074606) histone | gi\|4091980\|gb\|AAC99368.1\| | 87% | 1 | 525 |
| | | | | acetyltransferase [Homo | | | | |
| | | | | sapiens] | | | | |
| HTEGI48 | 530595 | 377 | HMMER | PFAM: Zinc finger, | PF01530 | 43.8 | 344 | 436 |
| | | | 2.1.1 | C2HC type | | | | |
| HSFAM09 | 573345 | 378 | HMMER | PFAM: Src homology | PF00018 | 5.33 | 195 | 218 |
| | | | 1.8 | domain 3 | | | | |
| HNFHK77 | 1182286 | 63 | blastx.14 | succinic semialdehyde | gi\|147901\|gb\|AAC36831.1\| | 100% | 180 | 647 |
| | | | | dehydrogenase | | 97% | 653 | 898 |
| | | | | [Escherichia coli] | | | | |
| HNFHK77 | 576186 | 379 | HMMER | PFAM: Aldehyde | PF00171 | 30.2 | 231 | 326 |
| | | | 2.1.1 | dehydrogenase family | | | | |
| HFXDO83 | 1012602 | 64 | blastx.14 | No definition line found | gi\|912476\|gb\|AAB18565.1\| | 85% | 93 | 596 |
| | | | | [Escherichia coli] | | | | |
| HFXDO83 | 578847 | 380 | HMMER | PFAM: Aldehyde | PF00171 | 46.2 | 58 | 207 |
| | | | 2.1.1 | dehydrogenase family | | | | |
| HSDIW73 | 1104406 | 65 | blastx.14 | (AE000506) putative | gi\|2367379\|gb\|AAC77312.1\| | 100% | 1 | 1068 |
| | | | | transport protein, cryptic, | | | | |
| | | | | orf, joins former yjiZ and | | | | |
| | | | | yjjL [Escherichia coli] | | | | |
| HSDIW73 | 587311 | 381 | HMMER | PFAM: Sugar (and other) | PF00083 | 19.71 | 5 | 538 |
| | | | 1.8 | transporters | | | | |
| | | | blastx.2 | (AE000506) putative | gb\|AAC77312.1\| | 100% | 8 | 1075 |
| | | | | transport protein, cryptic, | | | | |
| | | | | orf, joins former yjiZ and | | | | |
| | | | | yjjL [Escherichia coli] | | | | |
| HSDIW73 | 954821 | 382 | HMMER | PFAM: Sugar (and other) | PF00083 | 11.23 | 1595 | 1086 |
| | | | 1.8 | transporters | | | | |
| | | | blastx.2 | (AE000506) putative | gb\|AAC77312.1\| | 100% | 3 | 1049 |
| | | | | transport protein, cryptic, | | | | |
| | | | | orf, joins former yjiZ and | | | | |
| | | | | yjjL [Escherichia coli] | | | | |
| HFVGD23 | 676214 | 383 | HMMER | PFAM: Carnitate | PF00755 | 168.4 | 2 | 445 |
| | | | 2.1.1 | acyltransferase | | | | |
| HMSBZ24 | 1082367 | 67 | blastx.14 | contains similarity to C2 | gi\|1825586\|gb\|AAB42222.1\| | 39% | 8 | 241 |
| | | | | domains [Caenorhabditis | | 30% | 548 | 646 |
| | | | | elegans] | | 43% | 551 | 598 |
| | | | | | | 26% | 617 | 685 |
| HMSBZ24 | 678707 | 384 | HMMER | PFAM: C2 domain | PF00168 | 35.46 | 8 | 181 |
| | | | 1.8 | | | | | |
| | | | blastx.2 | CG15078 PROTEIN. | sp\|Q9V8M4\|Q9V8M4 | 50% | 8 | 289 |
| HWHHB69 | 690442 | 385 | HMMER | PFAM: Src homology | PF00018 | 31.65 | 91 | 255 |
| | | | 1.8 | domain 3 | | | | |
| | | | blastx.2 | (AF178432) SH3 protein | gb\|AAF35985.1\|AF178432_1 | 70% | 91 | 315 |
| | | | | [Homo sapiens] | | 100% | 303 | 329 |
| HFXLC69 | 692773 | 386 | HMMER | PFAM: C2 domain | PF00168 | 17.77 | 84 | 200 |
| | | | 1.8 | | | | | |
| HBXBW40 | 1156765 | 70 | blastx.14 | Protein Kinase [Rattus | gi\|2077934\|dbj\|BAA19880.1\| | 93% | 214 | 546 |
| | | | | norvegicus] | | 78% | 546 | 587 |
| HBXBW40 | 706115 | 387 | HMMER | PFAM: Eukaryotic protein | PF00069 | 34.01 | 280 | 423 |
| | | | 1.8 | kinase domain | | | | |
| HCE1L51 | 1140498 | 71 | blastx.14 | carnitine | gi\|294521\|gb\|AAA40876.1\| | 51% | 3 | 233 |
| | | | | palmitoyltransferase I | | 59% | 288 | 434 |
| | | | | [Rattus norvegicus] | | | | |
| HCE1L51 | 715899 | 388 | HMMER | PFAM: Carnitate | PF00755 | 102.9 | 33 | 434 |
| | | | 2.1.1 | acyltransferase | | | | |
| HRADM45 | 717358 | 389 | HMMER | PFAM: Eukaryotic protein | PF00069 | 23.7 | 14 | 124 |
| | | | 1.8 | kinase domain | | | | |
| | | | blastx.2 | (AJ271722) putative | emb\|CAB71146.1\| | 98% | 2 | 469 |
| | | | | serine/threonine protein | | | | |
| | | | | kinase MAK-V [Homo | | | | |
| | | | | sapiens] | | | | |
| HTEFO45 | 1153918 | 73 | blastx.14 | Munc13-3 [Rattus | gi\|1763306\|gb\|AAB39720.1\| | 94% | 64 | 597 |
| | | | | norvegicus] | | | | |
| HTEFO45 | 723446 | 390 | HMMER | PFAM: C2 domain | PF00168 | 30.64 | 111 | 383 |
| | | | 1.8 | | | | | |
| HOHBN82 | 1152271 | 74 | blastx.14 | (AF182316) myoferlin | gi\|6731235\|gb\|AAF27176.1\| | 94% | 92 | 1408 |
| | | | | [Homo sapiens] | AF182316_1 | 87% | 1418 | 1465 |
| | | | | | | 33% | 1259 | 1366 |
| | | | | | | 47% | 1397 | 1459 |
| | | | | | | 26% | 1259 | 1315 |
| HOHBN82 | 724322 | 391 | HMMER | PFAM: C2 domain | PF00168 | 49.95 | 96 | 347 |
| | | | 1.8 | | | | | |
| | | | blastx.2 | Myoferlin. | sp\|AAF27176\|AAF27176 | 80% | 93 | 623 |
| | | | | | | 58% | 571 | 606 |
| HWHGF52 | 1217026 | 75 | blastx.14 | GUANINE | sp\|Q64096\|DBS_MOUSE | 73% | 14 | 271 |
| | | | | NUCLEOTIDE | | 79% | 338 | 439 |
| | | | | EXCHANGE FACTOR | | 27% | 8 | 73 |
| | | | | DBS (DBLS BIG | | | | |
| | | | | SISTER) (MCF2 | | | | |
| | | | | TRANSFORMING | | | | |
| | | | | SEQUENCE-LIKE | | | | |
| | | | | PROTEIN). | | | | |
| HWHGF52 | 726102 | 392 | HMMER | PFAM: Src homology | PF00018 | 5.01 | 325 | 387 |
| | | | 1.8 | domain 3 | | | | |
| | | | blastx.2 | Dbs = Dbl guanine | gb\|AAB33461.1\| | 74% | 3 | 203 |
| | | | | nucleotide exchange | | 72% | 319 | 417 |
| | | | | factor homolog [mice, | | 73% | 203 | 259 |
| | | | | 32D 1 | | | | |
| HBKDI30 | 1223861 | 76 | blastx.14 | BA243J16.3 (similar to | sp\|CAC10006\|CAC10006 | 100% | 343 | 672 |
| | | | | MYLK (myosin, light | | 91% | 23 | 307 |
| | | | | polypeptide 1 | | | | |
| HBKDI30 | 729048 | 393 | HMMER | PFAM: Eukaryotic protein | PF00069 | 42.23 | 1 | 213 |
| | | | 1.8 | kinase domain | | | | |
| HSQFR54 | 1185143 | 77 | blastx.14 | vacuolar protein sorting | gi\|1477468\|gb\|AAC52985.1\| | 86% | 52 | 882 |
| | | | | homolog r-vps33a [Rattus | | 94% | 1134 | 1640 |
| | | | | norvegicus] | | 96% | 862 | 1137 |
| | | | | | | 92% | 1640 | 1837 |
| | | | | | | 31% | 1332 | 1466 |
| HSQFR54 | 730964 | 394 | HMMER | PFAM: Sec1 family | PF00995 | 66.1 | 2 | 259 |
| | | | 2.1.1 | | | | | |
| | | | blastx.2 | VACUOLAR PROTEIN | sp\|Q63615\|Q63615 | 86% | 2 | 310 |
| | | | | SORTING HOMOLOG | | | | |
| | | | | R-VPS33A. | | | | |
| HAGBA56 | 1102593 | 78 | blastx.14 | (AF033655) Pftaire-1 | gi\|2645810\|gb\|AAB87504.1\| | 95% | 187 | 735 |
| | | | | [Mus musculus] | | 58% | 1 | 153 |
| | | | | | | 79% | 132 | 203 |
| HAGBA56 | 732597 | 395 | HMMER | PFAM: Eukaryotic protein | PF00069 | 64.9 | 139 | 516 |
| | | | 2.1.1 | kinase domain | | | | |
| HHSAE29 | 1220851 | 79 | blastx.14 | probable sugar transport | pir\|S47743\|S47743 | 100% | 572 | 946 |
| | | | | protein - Escherichia coli | | 95% | 1021 | 1083 |
| HHSAE29 | 743166 | 396 | HMMER | PFAM: Sugar (and other) | PF00083 | 44.67 | 29 | 250 |
| | | | 1.8 | transporters | | | | |
| HMSHO64 | 746582 | 80 | HMMER | PFAM: Src homology | PF00018 | 11.08 | 316 | 405 |
| | | | 1.8 | domain 3 | | | | |
| | | | blastx.2 | (AF030131) Plenty of | gb\|AAC40070.1\| | 47% | 1 | 411 |
| | | | | SH3s; POSH [Mus | | | | |
| | | | | musculus] | | | | |
| HFPBW22 | 750631 | 397 | HMMER | PFAM: C2 domain | PF00168 | 19 | 323 | 430 |
| | | | 1.8 | | | | | |
| HTLBH67 | 751985 | 398 | HMMER | PFAM: Src homology | PF00018 | 37.78 | 16 | 162 |
| | | | 1.8 | domain 3 | | | | |
| HNTMH70 | 1143523 | 83 | blastx.14 | similar to protein kinases | gi\|1072163\|gb\|AAA81690.1\| | 50% | 425 | 667 |
| | | | | [Caenorhabditis elegans] | | 40% | 101 | 220 |
| | | | | | | 29% | 344 | 445 |
| | | | | | | 47% | 62 | 124 |
| HNTMH70 | 757184 | 399 | HMMER | PFAM: Eukaryotic protein | PF00069 | 94.55 | 176 | 577 |
| | | | 1.8 | kinase domain | | | | |
| HCETC59 | 761881 | 400 | HMMER | PFAM: Sec1 family | PF00995 | 60.4 | 117 | 305 |
| | | | 2.1.1 | | | | | |
| | | | blastx.2 | Vacuolar protein sorting | sp\|AAF91174\|AAF91174 | 78% | 123 | 368 |
| | | | | 33B. | | 100% | 67 | 123 |
| | | | | | | 64% | 311 | 412 |
| HE8UX76 | 1161223 | 85 | blastx.14 | (AB026803) | gi\|6136784\|dbj\|BAA85775.1\| | 98% | 437 | 1087 |
| | | | | synaptotagmin VI [Mus | | 91% | 98 | 454 |
| | | | | musculus] | | 97% | 1129 | 1383 |
| | | | | | | 36% | 692 | 841 |
| | | | | | | 34% | 1129 | 1242 |
| HE8UX76 | 767871 | 401 | HMMER | PFAM: C2 domain | PF00168 | 7.23 | 592 | 636 |
| | | | 1.8 | | | | | |
| HTLEN77 | 1136124 | 86 | blastx.14 | (AF081671) VU91D | gi\|3800851\|gb\|AAC68892.1\| | 43% | 240 | 392 |
| | | | | calmodulin [synthetic | | | | |
| | | | | construct] | | | | |
| HTLEN77 | 772363 | 402 | HMMER | PFAM: EF hand | PF00036 | 26.93 | 294 | 380 |
| | | | 1.8 | | | | | |
| | | | blastx.2 | CALTRACTIN | sp\|P53441\|CATR_NAEGR | 30% | 111 | 374 |
| | | | | (CENTRIN). | | | | |
| HBGDI80 | 1124695 | 87 | blastx.14 | (AL078627) actin-like | gi\|5051483\|emb\|CAB44762.1\| | 46% | 5 | 328 |
| | | | | protein; (2 actin domains) | | | | |
| | | | | [Schizosaccharomyces | | | | |
| | | | | pombe] | | | | |
| HBGDI80 | 781600 | 403 | HMMER | PFAM: Actin | PF00022 | 33.6 | 52 | 318 |
| | | | 2.1.1 | | | | | |
| | | | blastx.2 | CG7940 PROTEIN. | sp\|Q9VEC3\|Q9VEC3 | 37% | 13 | 336 |
| HELHB88 | 811935 | 404 | HMMER | PFAM: EF hand | PF00036 | 12.8 | 247 | 330 |
| | | | 1.8 | | | | | |
| | | | blastx.2 | INTERSECTIN LONG | sp\|Q9UNK2\|Q9UNK2 | 84% | 139 | 567 |
| | | | | ISOFORM. | | 46% | 145 | 375 |
| | | | | | | 100% | 78 | 146 |
| | | | | | | 30% | 361 | 495 |
| HTEMV66 | 1152261 | 89 | blastx.14 | contains EGF-like repeats; | gi\|495684\|gb\|AAA50735.1\| | 56% | 265 | 621 |
| | | | | highly similar to ZC84.1; 1 | | 44% | 61 | 195 |
| HTEMV66 | 813038 | 405 | HMMER | PFAM: Eukaryotic protein | PF00069 | 27.8 | 154 | 315 |
| | | | 2.1.1 | kinase domain | | | | |
| HMTAJ73 | 813296 | 406 | HMMER | PFAM: Eukaryotic protein | PF00069 | 21.34 | 4 | 114 |
| | | | 1.8 | kinase domain | | | | |
| HE9TD31 | 815845 | 91 | HMMER | PFAM: EF hand | PF00036 | 17.53 | 519 | 605 |
| | | | 1.8 | | | | | |
| | | | blastx.2 | Intersectin 2 short | sp\|AAF59904\|AAF59904 | 81% | 3 | 626 |
| | | | | isoform. | | 40% | 378 | 626 |
| HGBDG55 | 1141363 | 92 | blastx.14 | (AF004161) peroxisomal | gi\|2352427\|gb\| | 62% | 209 | 529 |
| | | | | Ca-dependent solute | AAB69156.1\| | | | |
| | | | | carrier [Oryctolagus | | | | |
| | | | | cuniculus] | | | | |
| HGBDG55 | 815858 | 407 | HMMER | PFAM: EF hand | PF00036 | 17.24 | 302 | 385 |
| | | | 1.8 | | | | | |
| | | | blastx.2 | Calcium-binding | sp\|AAF28888\|AAF28888 | 61% | 209 | 388 |
| | | | | transporter (Fragment). | | 64% | 381 | 530 |
| | | | | | | 37% | 284 | 388 |
| HOUHL51 | 1125914 | 93 | blastx.14 | (AJ249457) centrin, | gi\|5869981\|emb\|CAB55607.1\| | 29% | 230 | 487 |
| | | | | putative [Trichomonas | | 25% | 173 | 244 |
| | | | | vaginalis] | | | | |
| HOUHL51 | 815891 | 408 | HMMER | PFAM: EF hand | PF00036 | 29.3 | 429 | 506 |
| | | | 2.1.1 | | | | | |
| | | | blastx.2 | CENTRIN, PUTATIVE. | sp\|Q9U5I9\|Q9U5I9 | 26% | 48 | 506 |
| HEOPP67 | 1020119 | 94 | blastx.14 | guanylate cyclase | gi\|623417\|gb\|AAA60716.1\| | 31% | 169 | 474 |
| | | | | activating protein [Mus | | | | |
| | | | | musculus] | | | | |
| HEOPP67 | 827630 | 409 | HMMER | PFAM: EF hand | PF00036 | 35 | 233 | 316 |
| | | | 2.1.1 | | | | | |
| | | | blastx.2 | NADPH thyroid oxidase | sp\|AAF73922\|AAF73922 | 98% | 56 | 433 |
| | | | | 2. | | | | |
| HKAOV71 | 1165423 | 95 | blastx.14 | (AF123303) calcium- | gi\|6841066\|gb\|AAF28888.1\| | 88% | 61 | 753 |
| | | | | binding transporter [Homo | AF123303_1 | 93% | 711 | 755 |
| | | | | sapiens] | | | | |
| HKAOV71 | 827679 | 410 | HMMER | PFAM: EF hand | PF00036 | 50.7 | 220 | 300 |
| | | | 2.1.1 | | | | | |
| | | | blastx.2 | Calcium-binding | sp\|AAF28888\|AAF28888 | 88% | 61 | 753 |
| | | | | transporter (Fragment). | | 93% | 711 | 755 |
| HDQID90 | 1137752 | 96 | blastx.14 | (AF132480) Ese2 protein | gi\|4378889\|gb\|AAD19748.1\| | 75% | 11 | 268 |
| | | | | [Mus musculus] | | 47% | 472 | 522 |
| HDQID90 | 831976 | 411 | HMMER | PFAM: EF hand | PF00036 | 10.08 | 413 | 496 |
| | | | 1.8 | | | | | |
| | | | blastx.2 | Intersectin 2. | sp\|AAF63600\|AAF63600 | 87% | 206 | 694 |
| | | | | | | 36% | 272 | 565 |
| HFRBN81 | 1182552 | 97 | blastx.14 | (AE000192) putative | gi\|1787127\|gb\|AAC73985.1\| | 99% | 2163 | 598 |
| | | | | transport [Escherichia | | | | |
| | | | | coli] | | | | |
| HFRBN81 | 833061 | 412 | HMMER | PFAM: Sugar (and other) | PF00083 | 35.69 | 52 | 420 |
| | | | 1.8 | transporters | | | | |
| | | | blastx.2 | Hypothetical protein Y | dbj\|BAA35630.1\| | 100% | 1 | 1116 |
| | | | | [Escherichia coli] | | | | |
| HFRBN81 | 973206 | 413 | HMMER | PFAM: Sugar (and other) | PF00083 | 30.84 | 52 | 393 |
| | | | 1.8 | transporters | | | | |
| | | | blastx.2 | Hypothetical protein Y | dbj\|BAA35630.1\| | 80% | 4 | 546 |
| | | | | [Escherichia coli] | | | | |
| HFRBN81 | 973208 | 414 | blastx.2 | Hypothetical protein Y | dbj\|BAA35630.1\| | 97% | 2 | 352 |
| | | | | [Escherichia coli] | | 75% | 351 | 587 |
| | | | | | | 18% | 56 | 229 |
| HFKJW01 | 1187134 | 98 | blastx.14 | lactaldehyde | gi\|145222\|gb\|AAA23427.1\| | 100% | 394 | 8 |
| | | | | dehydrogenase | | | | |
| | | | | [Escherichia coli] | | | | |
| HFKJW01 | 836491 | 415 | HMMER | PFAM: Aldehyde | PF00171 | 174 | 96 | 440 |
| | | | 2.1.1 | dehydrogenase family | | | | |
| | | | blastx.2 | lactaldehyde | pir\|A38165\|A38165 | 100% | 96 | 440 |
| | | | | dehydrogenase (EC | | | | |
| | | | | 1.2.1.22) aldA - | | | | |
| | | | | Escherichia coli | | | | |
| HSDFL63 | 836498 | 416 | HMMER | PFAM: Aldehyde | PF00171 | 127.4 | 1 | 234 |
| | | | 2.1.1 | dehydrogenase family | | | | |
| | | | blastx.2 | RETINALDEHYDE- | sp\|O94788\|DHAS_HUMAN | 100% | 1 | 249 |
| | | | | SPECIFIC | | | | |
| | | | | DEHYDROGENASE | | | | |
| | | | | TYPE 2 (EC 1.2.1.—) | | | | |
| | | | | (RALDH(II)) (RALDH- | | | | |
| | | | | 2). | | | | |
| HDJET90 | 836503 | 100 | HMMER | PFAM: Aldehyde | PF00171 | 150.4 | 66 | 371 |
| | | | 2.1.1 | dehydrogenase family | | | | |
| HEMFC61 | 836514 | 101 | HMMER | PFAM: Aldehyde | PF00171 | 397.1 | 10 | 642 |
| | | | 2.1.1 | dehydrogenase family | | | | |
| | | | blastx.2 | RETINALDEHYDE- | sp\|O94788\|DHAS_HUMAN | 98% | 4 | 642 |
| | | | | SPECIFIC | | | | |
| | | | | DEHYDROGENASE | | | | |
| | | | | TYPE 2 (EC 1.2.1.—) | | | | |
| | | | | (RALDH(II)) (RALDH- | | | | |
| | | | | 2). | | | | |
| HDTBR50 | 1174351 | 102 | blastx.14 | intermediate chain 1 | gi\|14817526\|dbj\|BAA09934.1\| | 57% | 130 | 306 |
| | | | | [Anthocidaris crassispina] | | 44% | 327 | 455 |
| HDTBR50 | 846630 | 417 | HMMER | PFAM: Thioredoxins | PF00085 | 29.85 | 163 | 297 |
| | | | 1.8 | | | | | |
| | | | blastx.2 | NM23-H8. | sp\|AAF20909\|AAF20909 | 100% | 130 | 327 |
| | | | | | | 97% | 327 | 467 |
| HACCH94 | 847143 | 103 | HMMER | PFAM: 7 transmembrane | PF00001 | 167.94 | 10 | 735 |
| | | | 1.8 | receptor (rhodopsin | | | | |
| | | | | family) | | | | |
| | | | blastx.2 | ORPHAN G PROTEIN- | sp\|O95853\|O95853 | 99% | 7 | 879 |
| | | | | COUPLED RECEPTOR. | | | | |
| HE8TI39 | 849161 | 418 | HMMER | PFAM: EF hand | PF00036 | 12.66 | 9 | 86 |
| | | | 1.8 | | | | | |
| | | | blastx.2 | CDNA FLJ11040 FIS, | sp\|BAA91969\|BAA91969 | 98% | 3 | 371 |
| | | | | CLONE PLACE1004388. | | 64% | 299 | 685 |
| | | | | | | 63% | 627 | 719 |
| HEGAP32 | 851207 | 419 | HMMER | PFAM: C2 domain | PF00168 | 33.03 | 11 | 172 |
| | | | 1.8 | | | | | |
| | | | blastx.2 | SYNAPTOTAGMIN | sp\|Q9R0N6\|Q9R0N6 | 85% | 50 | 238 |
| | | | | VIII. | | 90% | 270 | 299 |
| | | | | | | 70% | 241 | 270 |
| HCWFU66 | 853005 | 106 | HMMER | PFAM: Aldehyde | PF00171 | 71.4 | 105 | 269 |
| | | | 2.1.1 | dehydrogenase family | | | | |
| HUSYI29 | 853149 | 107 | HMMER | PFAM: Sec1 family | PF00995 | 108.8 | 3 | 332 |
| | | | 2.1.1 | | | | | |
| | | | blastx.2 | VACUOLAR PROTEIN | sp\|Q63615\|Q63615 | 95% | 3 | 314 |
| | | | | SORTING HOMOLOG | | 93% | 403 | 591 |
| | | | | R-VPS33A. | | 90% | 335 | 394 |
| | | | | | | 31% | 87 | 221 |
| HMEFT66 | 1134131 | 108 | blastx.14 | (AF121859) sorting nexin | gi\|4689258\|gb\|AAD27832.1\| | 46% | 754 | 909 |
| | | | | 9 [Homo sapiens] | AF121859_1 | 40% | 193 | 324 |
| | | | | | | 57% | 142 | 183 |
| | | | | | | 41% | 688 | 738 |
| HMEFT66 | 856149 | 420 | HMMER | PFAM: Src homology | PF00018 | 28.51 | 5 | 136 |
| | | | 1.8 | domain 3 | | | | |
| HKAAR71 | 863023 | 109 | HMMER | PFAM: C2 domain | PF00168 | 16.26 | 309 | 551 |
| | | | 1.8 | | | | | |
| | | | blastx.2 | TOLLIP PROTEIN. | sp\|Q9UJ69\|Q9UJ69 | 78% | 147 | 959 |
| H7TBC95 | 865922 | 110 | HMMER | PFAM: 7 transmembrane | PF00001 | 189.5 | 3 | 695 |
| | | | 2.1.1 | receptor (rhodopsin | | | | |
| | | | | family) | | | | |
| | | | blastx.2 | G-protein coupled | sp\|BAA93001\| | 56% | 516 | 701 |
| | | | | receptor SALPR. | BAA93001 | 61% | 51 | 206 |
| | | | | | | 41% | 303 | 440 |
| H7TBC95 | 908115 | 421 | HMMER | PFAM: 7 transmembrane | PF00001 | 189.5 | 3 | 695 |
| | | | 2.1.1 | receptor (rhodopsin | | | | |
| | | | | family) | | | | |
| | | | blastx.2 | angiotensin II receptor | gb\|AAC59635.1\| | 34% | 6 | 695 |
| | | | | [Xenopus laevis] | | | | |
| HAPPX52 | 872075 | 422 | HMMER | PFAM: Sugar (and other) | PF00083 | 37.84 | 72 | 359 |
| | | | 1.8 | transporters | | | | |
| HBGSJ13 | 1152326 | 112 | blastx.14 | ferrienterobactin receptor | gi\|1778500\|gb\|AAB40783.1\| | 94% | 1 | 753 |
| | | | | precursor [Escherichia | | | | |
| | | | | coli] | | | | |
| HBGSJ13 | 878322 | 424 | HMMER | PFAM: Src homology | PF00018 | 4.07 | 445 | 510 |
| | | | 1.8 | domain 3 | | | | |
| | | | blastx.2 | ferrienterobactin receptor | gb\|AAB40783.1\| | 92% | 64 | 684 |
| | | | | precursor [Escherichia | | | | |
| | | | | coli] | | | | |
| HFKLX38 | 880220 | 113 | HMMER | PFAM: PMP- | PF00822 | 103.9 | 9 | 299 |
| | | | 2.1.1 | 22/EMP/MP20/Claudin | | | | |
| | | | | family | | | | |
| | | | blastx.2 | (AF087825) claudin-7 | gb\|AAD09760.1\| | 44% | 3 | 299 |
| | | | | [Mus musculus] | | | | |
| HTLGP15 | 1165362 | 114 | blastx.14 | (AF060173) SV2 related | gi\|3901268\|gb\|AAC78627.1\| | 88% | 301 | 786 |
| | | | | protein [Rattus | | | | |
| | | | | norvegicus] | | | | |
| HTLGP15 | 880297 | 425 | HMMER | PFAM: Sugar (and other) | PF00083 | 34.17 | 291 | 590 |
| | | | 1.8 | transporters | | | | |
| HMEGH46 | 887791 | 426 | HMMER | PFAM: C2 domain | PF00168 | 12.81 | 10 | 78 |
| | | | 1.8 | | | | | |
| | | | blastx.2 | GLUT4 VESICLE | sp\|Q9Z1X5\|Q9Z1X5 | 60% | 7 | 216 |
| | | | | PROTEIN | | 50% | 40 | 216 |
| | | | | (FRAGMENT). | | | | |
| HE8PY29 | 1129488 | 116 | blastx.14 | (AF100751) FK506- | gi\|5410288\|gb\|AAD43015.1\| | 100% | 2 | 277 |
| | | | | binding protein FKB23 | | | | |
| | | | | isoform [Homo sapiens] | | | | |
| HE8PY29 | 887862 | 427 | HMMER | PFAM: EF hand | PF00036 | 13.65 | 191 | 250 |
| | | | 1.8 | | | | | |
| | | | blastx.2 | FK506-BINDING | sp\|Q9Y6B0\|Q9Y6B0 | 100% | 2 | 277 |
| | | | | PROTEIN. | | | | |
| HTDAB17 | 890384 | 117 | HMMER | PFAM: Thioredoxin | PF00085 | 107.9 | 276 | 533 |
| | | | 2.1.1 | | | | | |
| | | | blastx.2 | CG1837 PROTEIN. | sp\|Q9VYV3\|Q9VYV3 | 42% | 225 | 518 |
| | | | | | | 43% | 231 | 539 |
| | | | | | | 41% | 348 | 533 |
| HCFCF47 | 894415 | 428 | HMMER | PFAM: Eukaryotic protein | PF00069 | 89.54 | 20 | 295 |
| | | | 1.8 | kinase domain | | | | |
| HDQHB19 | 895106 | 429 | HMMER | PFAM: Eukaryotic protein | PF00069 | 92.5 | 260 | 520 |
| | | | 2.1.1 | kinase domain | | | | |
| HAGDN53 | 1129154 | 120 | blastx.2 | PALS1. | sp\|AAF63789\|AAF63789 | 97% | 3 | 293 |
| HAGDN53 | 895963 | 430 | HMMER | PFAM: Src homology | PF00018 | 22.95 | 270 | 335 |
| | | | 1.8 | domain 3 | | | | |
| | | | blastx.2 | coded for by C. elegans | gb\|AAA96115.1\| | 43% | 165 | 455 |
| | | | | cDNA yk34a9.5; coded | | 38% | 103 | 156 |
| | | | | for by C. elegans 1 | | | | |
| | | | | elegans] | | | | |
| HUFDB74 | 1162672 | 121 | blastx.14 | phosphoinositide-specific | gi\|1195552\|gb\|AAA87954.1\| | 58% | 170 | 547 |
| | | | | phospholipase C [catfish, | | 69% | 2 | 160 |
| | | | | olfactory rosettes, Peptide | | | | |
| | | | | Partial, 502 aa] | | | | |
| HUFDB74 | 901451 | 431 | HMMER | PFAM: | PF00387 | 89.4 | 2 | 127 |
| | | | 2.1.1 | Phosphatidylinositol- | | | | |
| | | | | specific phospholipase C, | | | | |
| | | | | Y domain | | | | |
| HNHFH24 | 1092567 | 122 | blastx.2 | PRO1722. | sp\|AAF69605\|AAF69605 | 58% | 908 | 756 |
| | | | | | | 68% | 763 | 632 |
| HNHFH24 | 903741 | 432 | HMMER | PFAM: | PF00209 | 37.2 | 208 | 306 |
| | | | 2.1.1 | Sodium: neurotransmitter | | | | |
| | | | | symporter family | | | | |
| | | | blastx.14 | (AF075266) orphan | gi\|3347930\|gb\|AAC27761.1\| | 76% | 187 | 327 |
| | | | | transporter isoform B9 | | 27% | 414 | 467 |
| | | | | [Mus musculus] | | | | |
| HBGQT03 | 908173 | 433 | HMMER | PFAM: SH3 domain | PF00018 | 68.5 | 615 | 785 |
| | | | 2.1.1 | | | | | |
| | | | blastx.2 | (AF130979) SH3 domain- | gb\|AAF04472.1\|AF130979_1 | 93% | 3 | 791 |
| | | | | containing protein 6511 | | | | |
| | | | | [Homo sapiens] | | | | |
| HETLF29 | 1103959 | 124 | blastx.14 | (AJ250839) | gi\|7160989\|emb\|CAB76471.1\| | 97% | 3 | 482 |
| | | | | serine/threonine protein | | | | |
| | | | | kinase [Homo 1 | | | | |
| HETLF29 | 909762 | 434 | HMMER | PFAM: Eukaryotic protein | PF00069 | 143.18 | 6 | 416 |
| | | | 1.8 | kinase domain | | | | |
| | | | blastx.14 | similar to cAMP- | gi\|3878636\|emb\|CAA88953.1\| | 56% | 6 | 416 |
| | | | | dependant protein kinase; | | | | |
| | | | | cDNA EST 111 | | | | |
| HOUGD29 | 909797 | 435 | HMMER | PFAM: | PF00387 | 118.2 | 202 | 453 |
| | | | 2.1.1 | Phosphatidylinositol- | | | | |
| | | | | specific phospholipase C, | | | | |
| | | | | Y domain | | | | |
| | | | blastx.14 | (AF044576) | gi\|2957270\|gb\|AAC38963.1\| | 42% | 202 | 753 |
| | | | | phospholipase C PLC210 | | 35% | 757 | 873 |
| | | | | [Caenorhabditis elegans] | | 58% | 168 | 203 |
| HTEMV09 | 1128254 | 126 | blastx.14 | protein kinase I [Rattus | gi\|406113\|gb\|AAA19670.1\| | 44% | 1 | 321 |
| | | | | norvegicus] | | | | |
| HTEMV09 | 909843 | 436 | HMMER | PFAM: Eukaryotic protein | PF00069 | 99.16 | 19 | 312 |
| | | | 1.8 | kinase domain | | | | |
| | | | blastx.14 | protein kinase I [Rattus | gi\|406113\|gb\|AAA19670.1\| | 44% | 1 | 321 |
| | | | | norvegicus] | | | | |
| HNTNB14 | 1128964 | 127 | blastx.14 | calmodulin-binding | gi\|349075\|gb\|AAA16633.1\| | 98% | 42 | 476 |
| | | | | protein [Rattus | | 47% | 626 | 676 |
| | | | | norvegicus] | | 33% | 587 | 676 |
| HNTNB14 | 909942 | 437 | HMMER | PFAM: Eukaryotic protein | PF00069 | 96.28 | 38 | 343 |
| | | | 1.8 | kinase domain | | | | |
| | | | blastx.14 | calmodulin-binding | gi\|349075\|gb\|AAA16633.1 | 97% | 41 | 475 |
| | | | | protein [Rattus | | 85% | 553 | 657 |
| | | | | norvegicus] | | 74% | 553 | 657 |
| | | | | | | 77% | 553 | 657 |
| | | | | | | 69% | 559 | 657 |
| | | | | | | 65% | 553 | 657 |
| | | | | | | 60% | 553 | 657 |
| | | | | | | 52% | 553 | 654 |
| | | | | | | 37% | 553 | 657 |
| | | | | | | 39% | 553 | 636 |
| | | | | | | 35% | 553 | 645 |
| | | | | | | 33% | 559 | 657 |
| | | | | | | 77% | 512 | 538 |
| | | | | | | 29% | 556 | 657 |
| HE2KZ07 | 1149808 | 128 | blastx.14 | (AB004267) | gi\|3135197\|dbj\|BAA28263.1\| | 92% | 17 | 508 |
| | | | | Ca2+/calmodulin- | | | | |
| | | | | dependent protein kinase I | | | | |
| | | | | beta 2 [Rattus norvegicus] | | | | |
| HE2KZ07 | 909948 | 438 | HMMER | PFAM: Eukaryotic protein | PF00069 | 115.19 | 5 | 289 |
| | | | 1.8 | kinase domain | | | | |
| | | | blastx.14 | (AB004267) | gi\|3135197\|dbj\|BAA28263.1\| | 96% | 17 | 433 |
| | | | | Ca2+/calmodulin- | | 56% | 418 | 507 |
| | | | | dependent protein kinase I | | | | |
| | | | | beta 2 [Rattus norvegicus] | | | | |
| HSIGN57 | 1105444 | 129 | blastx.14 | (AB033615) | gi\|6705987\|dbj\|BAA89457.1\| | 96% | 3 | 962 |
| | | | | phospholipase C-L2 [Mus | | 70% | 982 | 1041 |
| | | | | musculus] | | | | |
| HSIGN57 | 910078 | 439 | HMMER | PFAM: | PF00387 | 159.3 | 131 | 484 |
| | | | 2.1.1 | Phosphatidylinositol- | | | | |
| | | | | specific phospholipase C, | | | | |
| | | | | Y domain | | | | |
| | | | blastx.2 | PHOSPHOLIPASE C-L2. | sp\|Q9QYG1\|Q9QYG1 | 83% | 2 | 754 |
| HLHBC30 | 1106654 | 130 | blastx.14 | 1-phosphatidylinositol- | pir\|S14113\|S14113 | 85% | 9 | 332 |
| | | | | 4,5-bisphosphate | | 77% | 408 | 512 |
| | | | | phosphodiesterase 1 | | 85% | 155 | 175 |
| HLHBC30 | 910079 | 440 | HMMER | PFAM: C2 domain | PF00168 | 104.78 | 45 | 305 |
| | | | 1.8 | | | | | |
| | | | blastx.2 | 1-phosphatidylinositol- | pir\|S14113\|S14113 | 83% | 9 | 332 |
| | | | | 4,5-bisphosphate | | 74% | 408 | 512 |
| | | | | phosphodiesterase 1 | | | | |
| HFBDJ13 | 1195217 | 131 | blastx.14 | SH3 domains-containing | pir\|T09071\|T09071 | 90% | 178 | 1182 |
| | | | | protein POSH - mouse | | 56% | 1171 | 1365 |
| | | | | | | 26% | 598 | 699 |
| | | | | | | 39% | 272 | 370 |
| | | | | | | 57% | 898 | 939 |
| | | | | | | 41% | 514 | 600 |
| | | | | | | 28% | 823 | 897 |
| | | | | | | 30% | 315 | 383 |
| HFBDJ13 | 911264 | 441 | HMMER | PFAM: SH3 domain | PF00018 | 78.6 | 105 | 269 |
| | | | 2.1.1 | | | | | |
| | | | blastx.2 | (AF030131) Plenty of | gb\|AAC40070.1\| | 78% | 3 | 473 |
| | | | | SH3s; POSH [Mus | | | | |
| | | | | musculus] | | | | |
| HTPGG25 | 911282 | 442 | HMMER | PFAM: Eukaryotic protein | PF00069 | 114.02 | 72 | 353 |
| | | | 1.8 | kinase domain | | | | |
| | | | blastx.2 | (AL117482) hypothetical | emb\|CAB55955.1\| | 94% | 9 | 353 |
| | | | | protein [Homo sapiens] | | 92% | 350 | 622 |
| | | | | | | 63% | 2 | 58 |
| HSSMT34 | 911294 | 133 | HMMER | PFAM: Eukaryotic protein | PF00069 | 53.16 | 95 | 292 |
| | | | 1.8 | kinase domain | | | | |
| HWWDN34 | 1152430 | 134 | blastx.14 | (AF144094) | gi\|6224683\|gb\|AAF05903.1\| | 45% | 350 | 814 |
| | | | | unconventional myosin-15 | | 51% | 128 | 349 |
| | | | | [Homo sapiens] | | 66% | 800 | 880 |
| | | | | | | 37% | 72 | 152 |
| | | | | | | 56% | 87 | 134 |
| | | | | | | 80% | 96 | 125 |
| | | | | | | 28% | 28 | 207 |
| | | | | | | 37% | 69 | 140 |
| | | | | | | 57% | 178 | 219 |
| | | | | | | 29% | 216 | 287 |
| | | | | | | 46% | 354 | 398 |
| | | | | | | 33% | 339 | 401 |
| | | | | | | 30% | 99 | 197 |
| | | | | | | 50% | 452 | 487 |
| HWWDN34 | 911357 | 443 | HMMER | PFAM: Src homology | PF00018 | 14.09 | 686 | 853 |
| | | | 1.8 | domain 3 | | | | |
| | | | blastx.2 | (AF053130) | gb\|AAC40124.1\| | 42% | 56 | 874 |
| | | | | unconventional myosin | | 66% | 788 | 868 |
| | | | | MYO15 [Mus musculus] | | | | |
| HCEPW85 | 911374 | 135 | HMMER | PFAM: Eukaryotic protein | PF00069 | 83.52 | 3 | 260 |
| | | | 1.8 | kinase domain | | | | |
| | | | blastx.14 | predicted using | gi\|3875903\|emb\|CAA94127.1\| | 87% | 3 | 260 |
| | | | | Genefinder; Similarity to | | | | |
| | | | | 111 cDNA | | | | |
| HMTAW83 | 1071602 | 136 | blastx.14 | (AF230904) c-Cbl- | gi\|7188749\|gb\|AAF37854.1\| | 94% | 1 | 354 |
| | | | | interacting protein [Homo 1 | AF230904_1 | 48% | 7 | 168 |
| | | | | | | 51% | 88 | 210 |
| | | | | | | 59% | 7 | 87 |
| | | | | | | 61% | 298 | 351 |
| | | | | | | 75% | 425 | 460 |
| | | | | | | 62% | 425 | 448 |
| HMTAW83 | 911385 | 444 | HMMER | PFAM: Src homology | PF00018 | 76.18 | 1 | 159 |
| | | | 1.8 | domain 3 | | | | |
| | | | blastx.2 | (AF230904) c-Cbl- | gb\|AAF37854.1\|AF230904_1 | 94% | 1 | 354 |
| | | | | interacting protein [Homo | | 52% | 7 | 210 |
| | | | | sapiens] | | 48% | 7 | 168 |
| | | | | | | 61% | 298 | 351 |
| | | | | | | 75% | 425 | 460 |
| HDMAV01 | 911386 | 445 | HMMER | PFAM: Src homology | PF00018 | 52.13 | 264 | 413 |
| | | | 1.8 | domain 3 | | | | |
| | | | blastx.2 | unnamed protein product | emb\|CAB42388.1\| | 73% | 111 | 410 |
| | | | | [unidentified] | | 100% | 3 | 116 |
| HDPSR74 | 911396 | 138 | HMMER | PFAM: Src homology | PF00018 | 47.19 | 293 | 460 |
| | | | 1.8 | domain 3 | | | | |
| | | | blastx.2 | (AF104246) enhancer of | gb\|AAD11795.1\| | 48% | 281 | 553 |
| | | | | filamentation 1 homolog | | | | |
| | | | | [Gallus gallus] | | | | |
| HHEZT58 | 911416 | 446 | HMMER | PFAM: Src homology | PF00018 | 80.7 | 277 | 444 |
| | | | 1.8 | domain 3 | | | | |
| | | | blastx.14 | myosin I heavy chain | gi\|167839\|gb\|AAA33229.1\| | 47% | 277 | 435 |
| | | | | [Dictyostelium | | | | |
| | | | | discoideum] | | | | |
| HTLDU05 | 911649 | 140 | HMMER | PFAM: Actins | PF00022 | 141.45 | 125 | 469 |
| | | | 1.8 | | | | | |
| | | | blastx.2 | ACTIN-LIKE-7-BETA. | sp\|Q9Y614\|Q9Y614 | 72% | 2 | 580 |
| HTLET56 | 1189721 | 141 | blastx.14 | actin [Filobasidiella | gi\|508701\|gb\|AAC49074.1\| | 52% | 192 | 854 |
| | | | | neoformans] | | 48% | 932 | 1291 |
| | | | | | | 30% | 837 | 986 |
| HTLET56 | 911654 | 447 | HMMER | PFAM: Actins | PF00022 | 262.03 | 134 | 703 |
| | | | 1.8 | | | | | |
| | | | blastx.2 | actin 1 - Trypanosoma | pir\|A27724\|A27724 | 53% | 134 | 715 |
| | | | | brucei | | 39% | 718 | 963 |
| | | | | | | 40% | 942 | 1022 |
| HTLCA95 | 911655 | 142 | HMMER | PFAM: Actin | PF00022 | 345.2 | 170 | 1096 |
| | | | 2.1.1 | | | | | |
| | | | blastx.2 | actin - Phaffia rhodozyma | pir\|S70377\|S70377 | 40% | 2 | 1096 |
| HTEJT86 | 1090517 | 143 | blastx.14 | actin [Diphyllobothrium | gi\|1098579\|gb\|AAA82604.1\| | 50% | 142 | 684 |
| | | | | dendriticum] | | 52% | 670 | 1119 |
| | | | | | | 55% | 22 | 129 |
| HTEJT86 | 911656 | 448 | HMMER | PFAM: Actin | PF00022 | 106.8 | 4 | 366 |
| | | | 2.1.1 | | | | | |
| | | | blastx.2 | ACTIN. | sp\|Q9UVF3\|Q9UVF3 | 44% | 25 | 369 |
| | | | | | | 66% | 366 | 410 |
| HTEMA54 | 1134919 | 144 | blastx.14 | (AF113526) actin-like-7- | gi\|5524058\|gb\|AAD44109.1\| | 94% | 55 | 1359 |
| | | | | alpha [Homo sapiens] | AF113526_1 | | | |
| HTEMA54 | 911666 | 449 | HMMER | PFAM: Actin | PF00022 | 320.7 | 247 | 1161 |
| | | | 2.1.1 | | | | | |
| | | | blastx.2 | ACTIN-LIKE-7-ALPHA. | sp\|Q9Y615\|Q9Y615 | 92% | 55 | 1167 |
| | | | | | | 82% | 1121 | 1360 |
| HTLGJ17 | 1135518 | 145 | blastx.14 | (AF191277) cytoplasmic | gi\|6478616\|gb\|AAF13923.1\| | 59% | 360 | 440 |
| | | | | actin [Cavia porcellus] | AF191277_1 | 44% | 521 | 574 |
| HTLGJ17 | 915136 | 450 | HMMER | PFAM: Actins | PF00022 | 25.12 | 237 | 317 |
| | | | 1.8 | | | | | |
| | | | blastx.2 | DJ63M2.2 (similar to | sp\|CAC08484\|CAC08484 | 81% | 93 | 413 |
| | | | | ACTIN) (Fragment). | | 76% | 403 | 465 |
| HOUES64 | 918119 | 146 | HMMER | PFAM: Aldehyde | PF00171 | 138.5 | 3 | 278 |
| | | | 2.1.1 | dehydrogenase family | | | | |
| | | | blastx.2 | lactaldehyde | pir\|A38165\|A38165 | 98% | 3 | 275 |
| | | | | dehydrogenase (EC | | | | |
| | | | | 1.2.1.22) aldA - | | | | |
| | | | | Escherichia coli | | | | |
| HMSCD15 | 982250 | 147 | blastx.14 | FBP 17 [Mus musculus] | gi\|1255033\|gb\|AAC52479.1\| | 93% | 453 | 635 |
| HMSCD15 | 918133 | 451 | HMMER | PFAM: Src homology | PF00018 | 41.06 | 453 | 599 |
| | | | 1.8 | domain 3 | | | | |
| | | | blastx.2 | (AK000975) unnamed | dbj\|BAA91451.1\| | 98% | 453 | 635 |
| | | | | protein product [Homo | | 29% | 387 | 479 |
| | | | | sapiens] | | 28% | 80 | 175 |
| HDQDX20 | 919027 | 452 | HMMER | PFAM: PX domain | PF00787 | 73.4 | 246 | 569 |
| | | | 2.1.1 | | | | | |
| | | | blastx.14 | serine/threonine protein | gi\|294637\|gb\|AAA42137.1\| | 78% | 633 | 974 |
| | | | | kinase [Rattus norvegicus] | | 44% | 465 | 578 |
| HLTHP86 | 1110457 | 149 | blastx.14 | (AF161420) HSPC302 | gi\|6841254\|gb\|AAF28980.1\| | 92% | 498 | 1349 |
| | | | | [Homo sapiens] | AF161420_1 | 76% | 1351 | 1833 |
| | | | | | | 100% | 1811 | 1849 |
| | | | | | | 52% | 1295 | 1351 |
| HLTHP86 | 919354 | 453 | HMMER | PFAM: TBC domain | PF00566 | 69.4 | 855 | 1274 |
| | | | 2.1.1 | | | | | |
| | | | blastx.2 | (AF161420) HSPC302 | gb\|AAF28980.1\|AF161420_1 | 89% | 456 | 1352 |
| | | | | [Homo sapiens] | | 99% | 1309 | 1974 |
| | | | | | | 52% | 1253 | 1309 |
| HMSOL52 | 921126 | 454 | HMMER | PFAM: EF hand | PF00036 | 12.43 | 276 | 359 |
| | | | 1.8 | | | | | |
| | | | blastx.2 | CG11041 PROTEIN. | sp\|Q9V8Z6\|Q9V8Z6 | 45% | 102 | 464 |
| HAHGD33 | 921782 | 455 | HMMER | PFAM: Eukaryotic protein | PF00069 | 83.68 | 4 | 564 |
| | | | 1.8 | kinase domain | | | | |
| | | | blastx.14 | (AF145690) | gi\|5052670\|gb\|AAD38665.1\| | 68% | 1 | 297 |
| | | | | BcDNA.LD28657 | AF145690_1 | 56% | 412 | 609 |
| | | | | [Drosophila melanogaster] | | 60% | 304 | 426 |
| | | | | | | 39% | 676 | 804 |
| HHEHC53 | 921783 | 152 | HMMER | PFAM: Eukaryotic protein | PF00069 | 58.81 | 507 | 797 |
| | | | 1.8 | kinase domain | | | | |
| | | | blastx.14 | (AF145690) | gi\|5052670\|gb\|AAD38665.1\| | 79% | 567 | 803 |
| | | | | BcDNA.LD28657 | AF145690_1 | 70% | 321 | 563 |
| | | | | [Drosophila melanogaster] | | | | |
| HE2PB01 | 921850 | 456 | HMMER | PFAM: Actin | PF00022 | 35.9 | 29 | 616 |
| | | | 2.1.1 | | | | | |
| | | | blastx.2 | HSPC281 (Fragment). | sp\|AAF28959\|AAF28959 | 100% | 2 | 541 |
| HOUDP52 | 1219522 | 154 | blastx.14 | CG7846 PROTEIN. | sp\|Q9VX09\|Q9VX09 | 43% | 27 | 491 |
| | | | | | | 52% | 1218 | 1361 |
| | | | | | | 35% | 501 | 752 |
| | | | | | | 35% | 1002 | 1202 |
| HOUDP52 | 922102 | 457 | HMMER | PFAM: Actin | PF00022 | 32 | 760 | 1095 |
| | | | 2.1.1 | | | | | |
| | | | blastx.2 | CG7846 PROTEIN. | sp\|Q9VX09\|Q9VX09 | 36% | 208 | 1104 |
| | | | | | | 46% | 23 | 190 |
| HHGAE47 | 1127881 | 155 | blastx.14 | (AF187305) calmodulin | gi\|5932428\|gb\|AAD56955.1\| | 45% | 59 | 499 |
| | | | | [Myxine glutinosa] | AF187305_1 | | | |
| HHGAE47 | 922194 | 458 | HMMER | PFAM: EF hand | PF00036 | 16.77 | 171 | 257 |
| | | | 1.8 | | | | | |
| | | | blastx.2 | calmodulin [validated] - | pir\|S48728\|MCHU | 48% | 310 | 576 |
| | | | | human | | 48% | 138 | 260 |
| HMCGL45 | 1165349 | 156 | blastx.14 | (AF187305) calmodulin | gi\|5932428\|gb\|AAD56955.1\| | 45% | 464 | 904 |
| | | | | [Myxine glutinosa] | AF187305_1 | | | |
| HMCGL45 | 922195 | 459 | HMMER | PFAM: EF hand | PF00036 | 26.6 | 460 | 546 |
| | | | 2.1.1 | | | | | |
| | | | blastx.2 | CALMODULIN. | sp\|Q9U6D3\|Q9U6D3 | 45% | 460 | 867 |
| HELEF11 | 1153884 | 157 | blastx.14 | gamma-glutamyl | gi\|1552811\|gb\|AAB08663.1\| | 100% | 1283 | 531 |
| | | | | phosphate reductase | | | | |
| | | | | [Escherichia coli] | | | | |
| HELEF11 | 926930 | 460 | HMMER | PFAM: Pyridoxal- | PF00282 | 202.9 | 146 | 565 |
| | | | 2.1.1 | dependent decarboxylase | | | | |
| | | | | conserved domain | | | | |
| | | | blastx.2 | glutamate decarboxylase | pir\|B43332\|B43332 | 81% | 131 | 721 |
| | | | | (EC 4.1.1.15) beta - | | 100% | 45 | 152 |
| | | | | Escherichia coli | | 56% | 595 | 780 |
| | | | | | | 47% | 564 | 620 |
| HETJX04 | 1212235 | 158 | blastx.14 | GRANUPHILIN-A. | sp\|Q9R0Q1\|Q9R0Q1 | 94% | 6 | 683 |
| | | | | | | 64% | 685 | 810 |
| | | | | | | 87% | 804 | 827 |
| HETJX04 | 927120 | 461 | HMMER | PFAM: C2 domain | PF00168 | 150.4 | 9 | 260 |
| | | | 2.1.1 | | | | | |
| | | | blastx.2 | GRANUPHILIN-A. | sp\|Q9R0Q1\|Q9R0Q1 | 94% | 6 | 683 |
| | | | | | | 57% | 685 | 831 |
| | | | | | | 48% | 719 | 859 |
| HSOBC04 | 927280 | 462 | HMMER | PFAM: EF hand | PF00036 | 23.5 | 278 | 346 |
| | | | 2.1.1 | | | | | |
| | | | blastx.2 | hypothetical protein | pir\|T42709\|T42709 | 88% | 41 | 388 |
| | | | | DKFZp586I0821.1 - | | | | |
| | | | | human (fragment) | | | | |
| HE8PW83 | 1069980 | 160 | blastx.14 | (AB002584) beta-alanine- | gi\|1944136\|dbj\|BAA19549.1\| | 86% | 4 | 546 |
| | | | | pyruvate aminotransferase 1 | | | | |
| HE8PW83 | 927532 | 463 | HMMER | PFAM: | PF00202 | 139.27 | 4 | 465 |
| | | | 1.8 | Aminotransferases class- | | | | |
| | | | | III pyridoxal-phosphate | | | | |
| | | | blastx.2 | ALANINE - | sp\|Q64565\|AGT2_R | 83% | 4 | 546 |
| | | | | GLYOXYLATE | AT | | | |
| | | | | AMINOTRANSFERASE | | | | |
| | | | | 2 PRECURSOR (EC 11 | | | | |
| HWLEA48 | 927676 | 161 | HMMER | PFAM: Eukaryotic protein | PF00069 | 32.82 | 190 | 381 |
| | | | 1.8 | kinase domain | | | | |
| | | | blastx.2 | (AF169034) protein | gb\|AAF12757.2\|AF169034_1 | 59% | 154 | 429 |
| | | | | kinase [Homo sapiens] | | 100% | 89 | 166 |
| | | | | | | 51% | 287 | 415 |
| HNHNP81 | 1129143 | 162 | blastx.14 | (AF091575) olfactory | gi\|3769641\|gb\|AAC64595.1\| | 62% | 618 | 896 |
| | | | | receptor [Rattus | | 61% | 236 | 505 |
| | | | | norvegicus] | | 72% | 502 | 621 |
| HNHNP81 | 928378 | 464 | HMMER | PFAM: 7 transmembrane | PF00001 | 58.09 | 233 | 511 |
| | | | 1.8 | receptor (rhodopsin | | | | |
| | | | | family) | | | | |
| | | | blastx.2 | OLFACTORY | sp\|Q9Z231\|Q9Z231 | 61% | 236 | 505 |
| | | | | RECEPTOR | | 52% | 502 | 618 |
| | | | | (FRAGMENT). | | | | |
| HFIDL68 | 1123641 | 163 | blastx.14 | G protein-coupled | gi\|438129\|emb\|CAA80651.1\| | 44% | 945 | 742 |
| | | | | receptor [Lymnaea | | 46% | 1086 | 997 |
| | | | | stagnalis] | | | | |
| HFIDL68 | 928475 | 465 | HMMER | PFAM: 7 transmembrane | PF00001 | 50.42 | 8 | 319 |
| | | | 1.8 | receptor (rhodopsin | | | | |
| | | | | family) | | | | |
| | | | blastx.2 | CG5042 PROTEIN. | sp\|Q9VBP0\|Q9VBP0 | 38% | 8 | 397 |
| HUJCT05 | 1165261 | 164 | blastx.14 | (AF155116) NY-REN-60 | gi\|5360127\|gb\|AAD42882.1\| | 100% | 1277 | 1540 |
| | | | | antigen [Homo sapiens] | AF155116_1 | | | |
| HUJCT05 | 929264 | 466 | HMMER | PFAM: EF hand | PF00036 | 11.52 | 359 | 433 |
| | | | 1.8 | | | | | |
| | | | blastx.2 | CG8334 PROTEIN | sp\|Q9VW49\|Q9VW49 | 59% | 56 | 499 |
| | | | | (FRAGMENT). | | | | |
| HTEGO05 | 932583 | 165 | HMMER | PFAM: Eukaryotic protein | PF00069 | 50.8 | 3 | 233 |
| | | | 2.1.1 | kinase domain | | | | |
| | | | blastx.14 | male germ cell-associated | gi\|205278\|gb\|AAA41562.1\| | 85% | 3 | 395 |
| | | | | kinase (mak) [Rattus | | 64% | 489 | 761 |
| | | | | norvegicus] | | 85% | 768 | 848 |
| | | | | | | 38% | 1023 | 1100 |
| HRDBH58 | 1226719 | 166 | blastx.14 | probable aldehyde | pir\|II83136\|H83136 | 38% | 1320 | 1637 |
| | | | | dehydrogenase PA4073 | | 40% | 2124 | 2309 |
| | | | | [imported] - Pseudomonas | | 56% | 675 | 770 |
| | | | | aeruginosa (strain PAO1) | | 31% | 462 | 635 |
| | | | | | | 27% | 2328 | 2471 |
| | | | | | | 23% | 894 | 1094 |
| | | | | | | 40% | 1101 | 1196 |
| | | | | | | 30% | 354 | 461 |
| | | | | | | 50% | 831 | 872 |
| | | | | | | 25% | 1125 | 1184 |
| HRDBH58 | 933364 | 467 | HMMER | PFAM: Aldehyde | PF00171 | 175.49 | 536 | 1558 |
| | | | 1.8 | dehydrogenases | | | | |
| | | | blastx.2 | probable aldehyde | pir\|H83136\|H83136 | 29% | 569 | 1528 |
| | | | | dehydrogenase PA4073 | | 34% | 244 | 450 |
| | | | | [imported] - Pseudomonas | | | | |
| | | | | aeruginosa (strain PAO1) | | | | |
| HSDGW22 | 934467 | 167 | HMMER | PFAM: Eukaryotic protein | PF00069 | 44 | 145 | 318 |
| | | | 2.1.1 | kinase domain | | | | |
| | | | blastx.14 | (AF071071) protein | gi\|5305333\|gb\|AAD41593.1\| | 96% | 145 | 318 |
| | | | | kinase Myak-S [Mus | AF071071_1 | 100% | 9 | 143 |
| | | | | musculus] | | 100% | 303 | 326 |
| HNTMD79 | 1126594 | 168 | blastx.14 | (AB037134) IRE homolog | gi\|6729348\|dbj\|BAA89784.1\| | 58% | 232 | 603 |
| | | | | 1 [Arabidopsis thaliana] | | 66% | 157 | 228 |
| HNTMD79 | 934522 | 468 | HMMER | PFAM: Eukaryotic protein | PF00069 | 130.82 | 203 | 586 |
| | | | 1.8 | kinase domain | | | | |
| | | | blastx.14 | LATS [Drosophila | gi\|903942\|gb\|AAA70336.1\| | 52% | 239 | 586 |
| | | | | melanogaster] | | 33% | 76 | 156 |
| | | | | | | 57% | 169 | 210 |
| | | | | | | 22% | 64 | 240 |
| HCE5J51 | 1197900 | 169 | blastx.14 | SRG1. | sp\|P97610\|P97610 | 98% | 11 | 703 |
| HCE5J51 | 934524 | 469 | HMMER | PFAM: C2 domain | PF00168 | 82.59 | 338 | 604 |
| | | | 1.8 | | | | | |
| | | | blastx.14 | Srg1 [Rattus norvegicus] | gi\|1772658\|gb\|AAC53019.1\| | 94% | 12 | 302 |
| | | | | | | 86% | 293 | 622 |
| | | | | | | 88% | 625 | 702 |
| HHEFQ42 | 1151482 | 170 | blastx.14 | (AB025258) granuphilin-a | gi\|5926736\|dbj\|BAA84656.1\| | 40% | 57 | 428 |
| | | | | [Mus musculus] | | 56% | 810 | 980 |
| | | | | | | 48% | 618 | 815 |
| | | | | | | 42% | 630 | 743 |
| | | | | | | 31% | 186 | 299 |
| | | | | | | 46% | 567 | 605 |
| HHEFQ42 | 934527 | 470 | HMMER | PFAM: C2 domain | PF00168 | 128.8 | 203 | 472 |
| | | | 2.1.1 | | | | | |
| | | | blastx.14 | (AB025258) granuphilin-a | gi\|5926736\|dbj\|BAA84656.1\| | 40% | 128 | 505 |
| | | | | [Mus musculus] | | 57% | 887 | 1057 |
| | | | | | | 46% | 695 | 892 |
| | | | | | | 39% | 707 | 820 |
| | | | | | | 31% | 263 | 376 |
| | | | | | | 46% | 644 | 682 |
| | | | | | | 38% | 572 | 610 |
| | | | | | | 75% | 107 | 130 |
| HLQDC55 | 1082368 | 171 | blastx.14 | (AK002037) unnamed | gi\|7023676\|dbj\|BAA92048.1\| | 49% | 332 | 496 |
| | | | | protein product [Homo | | 42% | 149 | 253 |
| | | | | sapiens] | | | | |
| HLQDC55 | 934528 | 471 | HMMER | PFAM: C2 domain | PF00168 | 81.1 | 1 | 216 |
| | | | 2.1.1 | | | | | |
| | | | blastx.2 | CG15078 PROTEIN. | sp\|Q9V8M4\|Q9V8M4 | 34% | 7 | 441 |
| | | | | | | 43% | 1 | 234 |
| | | | | | | 64% | 444 | 494 |
| HFPHI62 | 1195825 | 172 | blastx.14 | rabphilin-3A - bovine | pir\|A48097\|A48097 | 95% | 184 | 1119 |
| | | | | | | 68% | 4 | 90 |
| HFPHI62 | 934529 | 472 | HMMER | PFAM: C2 domain | PF00168 | 106.44 | 27 | 293 |
| | | | 1.8 | | | | | |
| | | | blastx.2 | rabphilin-3A - mouse | pir\|JX0338\|JX0338 | 90% | 3 | 410 |
| HE8QH09 | 1152238 | 173 | blastx.14 | (AB000893) | gi\|1840399\|dbj\|BAA19204.1\| | 95% | 28 | 591 |
| | | | | synaptotagmin 3 [Mus | | 96% | 585 | 923 |
| | | | | musculus] | | 39% | 46 | 228 |
| | | | | | | 33% | 193 | 351 |
| | | | | | | 39% | 453 | 521 |
| HE8QH09 | 934532 | 473 | HMMER | PFAM: C2 domain | PF00168 | 168.2 | 77 | 337 |
| | | | 2.1.1 | | | | | |
| | | | blastx.14 | (AB000893) | gi\|1840399\|dbj\|BAA19204.1\| | 92% | 56 | 568 |
| | | | | synaptotagmin 3 [Mus | | 98% | 564 | 830 |
| | | | | musculus] | | 42% | 407 | 556 |
| | | | | | | 33% | 573 | 731 |
| | | | | | | 32% | 170 | 328 |
| | | | | | | 34% | 56 | 205 |
| | | | | | | 100% | 21 | 53 |
| | | | | | | 39% | 430 | 498 |
| HFAAX29 | 1128791 | 174 | blastx.14 | (AF000423) | gi\|2130632\|gb\|AAB58344.1\| | 99% | 25 | 570 |
| | | | | synaptotagmin XI [Rattus | | 35% | 385 | 510 |
| | | | | norvegicus] | | 25% | 169 | 333 |
| | | | | | | 47% | 331 | 387 |
| HFAAX29 | 934540 | 474 | HMMER | PFAM: C2 domain | PF00168 | 115.2 | 194 | 463 |
| | | | 2.1.1 | | | | | |
| | | | blastx.2 | SYNAPTOTAGMIN XI. | sp\|O08835\|O08835 | 98% | 8 | 550 |
| | | | | | | 32% | 149 | 490 |
| HHFOC79 | 1182276 | 175 | blastx.14 | (AF081251) putative eps | gi\|3415099\|gb\|AAC31599.1\| | 97% | 84 | 296 |
| | | | | protein [Rattus | | | | |
| | | | | norvegicus] | | | | |
| HIIFOC79 | 935406 | 475 | HMMER | PFAM: EF hand | PF00036 | 13.96 | 186 | 263 |
| | | | 1.8 | | | | | |
| | | | blastx.2 | EH domain containing 2. | sp\|AAF40470\|AAF40470 | 98% | 54 | 248 |
| HOGEQ43 | 935465 | 476 | HMMER | PFAM: Src homology | PF00018 | 28.13 | 58 | 132 |
| | | | 1.8 | domain 3 | | | | |
| | | | blastx.2 | (AF132480) Ese2 protein | gb\|AAD19748.1\| | 93% | 37 | 132 |
| | | | | [Mus musculus] | | | | |
| IICECQ23 | 938398 | 177 | HMMER | PFAM: CUB domain | PF00431 | 53.7 | 567 | 433 |
| | | | 2.1.1 | | | | | |
| | | | blastx.2 | seizure-related protein | pir\|I52657\|I52657 | 93% | 810 | 370 |
| | | | | SEZ-6 precursor - mouse | | 90% | 335 | 237 |
| | | | | | | 29% | 765 | 370 |
| | | | | | | 35% | 744 | 571 |
| | | | | | | 30% | 747 | 574 |
| | | | | | | 27% | 687 | 484 |
| | | | | | | 27% | 537 | 409 |
| HTGAU79 | 1178621 | 178 | blastx.14 | (AL157917) similarity to | gi\|7106102\|emb\|CAB76028.1\| | 50% | 745 | 966 |
| | | | | endopeptidases 1 | | 38% | 361 | 561 |
| | | | | | | 52% | 607 | 720 |
| | | | | | | 52% | 313 | 363 |
| HTGAU79 | 940369 | 477 | HMMER | PFAM: Eukaryotic protein | PF00069 | 31.25 | 315 | 779 |
| | | | 1.8 | kinase domain | | | | |
| | | | blastx.2 | (AL157917) similarity to | emb\|CAB76028.1\| | 45% | 324 | 977 |
| | | | | endopeptidases | | | | |
| | | | | [Schizosaccharomyces 1 | | | | |
| HE9FI33 | 1156432 | 179 | blastx.14 | putative integral | gi\|3004482\|emb\|CAA71076.1\| | 59% | 14 | 286 |
| | | | | membrane transport | | 61% | 1153 | 1206 |
| | | | | protein [Rattus | | | | |
| | | | | norvegicus] | | | | |
| HE9FI33 | 941348 | 478 | HMMER | PFAM: Sugar (and other) | PF00083 | 17.62 | 210 | 422 |
| | | | 1.8 | transporters | | | | |
| | | | blastx.2 | putative integral | emb\|CAA71076.1\| | 53% | 3 | 428 |
| | | | | membrane transport | | | | |
| | | | | protein [Rattus | | | | |
| | | | | norvegicus] | | | | |
| HNHCP79 | 941862 | 480 | HMMER | PFAM: 7 transmembrane | PF00001 | 118.47 | 2 | 670 |
| | | | 1.8 | receptor (rhodopsin | | | | |
| | | | | family) | | | | |
| | | | blastx.14 | (AF102533) olfactory | gi\|3983394\|gb\|AAD13325.1\| | 55% | 2 | 658 |
| | | | | receptor F7 [Mus | | | | |
| | | | | musculus] | | | | |
| HTLIY52 | 1194806 | 181 | blastx.14 | TESTIS-SPECIFIC | sp\|Q61241\|Q61241 | 46% | 624 | 956 |
| | | | | SERINE/THREONINE | | 48% | 126 | 398 |
| | | | | KINASE. | | 45% | 411 | 563 |
| | | | | | | 42% | 549 | 605 |
| HTLIY52 | 942161 | 481 | HMMER | PFAM: Eukaryotic protein | PF00069 | 251.19 | 166 | 933 |
| | | | 1.8 | kinase domain | | | | |
| | | | blastx.2 | serine/threonine kinase | gb\|AAA99535.1\| | 44% | 133 | 936 |
| | | | | [Mus musculus] | | | | |
| HRAED74 | 942527 | 182 | HMMER | PFAM: Eukaryotic protein | PF00069 | 59.6 | 406 | 612 |
| | | | 1.8 | kinase domain | | | | |
| | | | blastx.2 | (AB023658) | dbj\|BAA75246.1\| | 97% | 71 | 346 |
| | | | | Ca/calmodulin-dependent | | 81% | 388 | 648 |
| | | | | protein kinase kinase | | 71% | 342 | 425 |
| | | | | alpha, CaM-kinase kinase | | 88% | 662 | 688 |
| | | | | alpha [Rattus norvegicus] | | | | |
| HFKKN77 | 943757 | 183 | HMMER | PEAM: 7 transmembrane | PF00001 | 80.79 | 274 | 573 |
| | | | 1.8 | receptor (rhodopsin | | | | |
| | | | | family) | | | | |
| | | | blastx.2 | G-protein coupled | pir\|JC7289\|JC7289 | 82% | 160 | 714 |
| | | | | receptor, SREB3 - human | | | | |
| HTEMU66 | 1205381 | 184 | blastx.14 | MEK KINASE ALPHA. | sp\|O96611\|O96611 | 51% | 714 | 962 |
| | | | | | | 66% | 633 | 668 |
| HTEMU66 | 944419 | 482 | HMMER | PFAM: Eukaryotic protein | PF00069 | 114.85 | 613 | 963 |
| | | | 1.8 | kinase domain | | | | |
| | | | blastx.2 | MEK Kinase 3 [Mus | gb\|AAB03535.1\| | 49% | 604 | 948 |
| | | | | musculus] | | 29% | 209 | 340 |
| HWAGU62 | 1206797 | 185 | blastx.14 | Zinc transporter like 1. | sp\|AAF43422\|AAF43422 | 95% | 264 | 827 |
| | | | | | | 96% | 969 | 1511 |
| | | | | | | 93% | 29 | 262 |
| | | | | | | 33% | 22 | 111 |
| HWAGU62 | 945368 | 483 | HMMER | PFAM: Cation efflux | PF01545 | 152 | 619 | 1395 |
| | | | 2.1.1 | family | | | | |
| | | | blastx.2 | (AC007231) putative | gb\|AAD32753.1\|AC007231_1 | 45% | 388 | 858 |
| | | | | cation transport protein | | 42% | 910 | 1386 |
| | | | | [Arabidopsis thaliana] | | 38% | 883 | 951 |
| HFPFB39 | 1198036 | 186 | blastx.14 | CG8745 PROTEIN. | sp\|Q9VU95\|Q9VU95\| | 65% | 153 | 614 |
| | | | | | | 60% | 693 | 935 |
| | | | | | | 65% | 945 | 1118 |
| | | | | | | 66% | 1332 | 1412 |
| | | | | | | 35% | 1161 | 1328 |
| | | | | | | 50% | 609 | 686 |
| HFPFB39 | 946170 | 484 | HMMER | PFAM: | PF00202 | 235.05 | 1613 | 714 |
| | | | 1.8 | Aminotransferases class- | | | | |
| | | | | III pyridoxal-phosphate | | | | |
| | | | blastx.2 | hypothetical protein | pir\|T25848\|T25848 | 49% | 1613 | 651 |
| | | | | T01B11.2 - | | | | |
| | | | | Caenorhabditis elegans | | | | |
| HPMFI38 | 1165993 | 187 | blastx.14 | (AB005451) RST [Mus | gi\|2696709\|dbj\|BAA23875.1\| | 51% | 30 | 296 |
| | | | | musculus] | | 73% | 382 | 438 |
| HPMFI38 | 946252 | 485 | HMMER | PFAM: Sugar (and other) | PF00083 | 32.16 | 860 | 564 |
| | | | 1 .8 | transporters | | | | |
| | | | blastx.2 | renal organic anion | emb\|CAB09724.1\| | 43% | 15 | 488 |
| | | | | transporter | | | | |
| | | | | [Pseudopleuronectes | | | | |
| | | | | americanus] | | | | |
| HBXDJ07 | 946830 | 188 | HMMER | PFAM: Synaptophysin/ | PF01284 | 406.7 | 125 | 604 |
| | | | 2.1.1 | synaptoporin | | | | |
| | | | blastx.2 | synaptoporin - rat | pir\|JH0300\|JH0300 | 90% | 125 | 643 |
| | | | | | | 91% | 610 | 921 |
| HOFMS43 | 1152417 | 189 | blastx.14 | porcine membrane | gi\|1018989\|dbj\|BAA20476.1\| | 62% | 325 | 738 |
| | | | | cofactor protein [Sus | | 47% | 7 | 312 |
| | | | | scrofa] | | 52% | 322 | 378 |
| | | | | | | 29% | 673 | 765 |
| | | | | | | 36% | 688 | 744 |
| | | | | | | 33% | 512 | 574 |
| HOFMS43 | 947973 | 486 | HMMER | PFAM: Sushi domain | PF00084 | 64 | 174 | 302 |
| | | | 2.1.1 | (SCR repeat) | | | | |
| | | | blastx.2 | PORCINE MEMBRANE | sp\|O02839\|O02839 | 47% | 12 | 317 |
| | | | | COFACTOR PROTEIN. | | | | |
| HOVCO14 | 1091087 | 190 | blastx.2 | C4BP beta chain, leader | emb\|CAA90392.1\| | 34% | 3 | 434 |
| | | | | [Rattus norvegicus] | | | | |
| HOVCO14 | 947999 | 487 | HMMER | PFAM: Sushi domain | PF00084 | 84 | 21 | 170 |
| | | | 2.1.1 | (SCR repeat) | | | | |
| | | | blastx.2 | UNKNOWN PROTEIN | sp\|Q28797\|Q28797 | 33% | 21 | 347 |
| | | | | (FRAGMENT). | | 34% | 21 | 380 |
| | | | | | | 38% | 424 | 516 |
| | | | | | | 47% | 424 | 474 |
| HTEPE35 | 1105272 | 191 | blastx.14 | 1-phosphatidylinositol- | pir\|S14113\|S14113 | 53% | 1 | 357 |
| | | | | 4,5-bisphosphate | | 51% | 451 | 750 |
| | | | | phosphodiesterase 1 | | | | |
| HTEPE35 | 948475 | 488 | HMMER | PFAM: | PF00387 | 163.8 | 839 | 507 |
| | | | 2.1.1 | Phosphatidylinositol- | | | | |
| | | | | specific phospholipase C, | | | | |
| | | | | Y domain | | | | |
| | | | blastx.2 | 1-phosphatidylinositol- | pir\|S14113\|S14113 | 48% | 839 | 90 |
| | | | | 4,5-bisphosphate | | | | |
| | | | | phosphodiesterase 1 | | | | |
| HE8UA52 | 1229490 | 192 | blastx.14 | collagen alpha 3(VI) chain | pir\|A37797\|A37797 | 34% | 121 | 729 |
| | | | | precursor - chicken | | 32% | 805 | 1353 |
| | | | | | | 35% | 700 | 819 |
| | | | | | | 19% | 208 | 330 |
| | | | | | | 44% | 814 | 867 |
| | | | | | | 24% | 196 | 306 |
| | | | | | | 50% | 808 | 861 |
| | | | | | | 26% | 208 | 330 |
| | | | | | | 30% | 395 | 484 |
| HE8UA52 | 948509 | 489 | HMMER | PFAM: von Willebrand | PF00092 | 57.11 | 208 | 561 |
| | | | 1.8 | factor type A domain | | | | |
| | | | blastx.2 | collagen alpha 3(VI) chain - | pir\|S32605\|S32605 | 41% | 121 | 576 |
| | | | | mouse (fragment) | | | | |
| HOUBE50 | 1090776 | 193 | blastx.14 | neuroligin 3 [Rattus | gi\|1145791\|gb\|AAA97871.1\| | 74% | 376 | 1140 |
| | | | | norvegicus] | | 67% | 31 | 252 |
| | | | | | | 77% | 277 | 381 |
| | | | | | | 68% | 1134 | 1181 |
| HOUBE50 | 948519 | 490 | HMMER | PFAM: Carboxylesterases | PF00135 | 55.97 | 16 | 243 |
| | | | 1.8 | | | | | |
| | | | blastx.2 | Neuroligin 3 isoform | sp\|AAF71231\|AAF71231 | 70% | 31 | 243 |
| | | | | HNL3s (Fragment). | | | | |
| HAJAV28 | 1165229 | 194 | blastx.14 | (AK000544) unnamed | gi\|7020711\|dbj\|BAA91243.1\| | 95% | 96 | 1118 |
| | | | | protein product [Homo | | 100% | 1064 | 1345 |
| | | | | sapiens] | | | | |
| HAJAV28 | 948630 | 491 | HMMER | PFAM: Actin | PF00022 | 35.9 | 120 | 230 |
| | | | 2.1.1 | | | | | |
| | | | blastx.2 | Uncharacterized | sp\|AAF67655\|AAF67655 | 97% | 96 | 458 |
| | | | | hypothalamus protein | | | | |
| | | | | HARP11. | | | | |
| HAQBZ89 | 1083554 | 195 | blastx.14 | strong similarity to class- | gi\|1707274\|gb\|AAB37999.1\| | 49% | 249 | 578 |
| | | | | III of 1 elegans] | | 38% | 594 | 881 |
| | | | | | | 52% | 873 | 992 |
| | | | | | | 54% | 1 | 72 |
| | | | | | | 58% | 186 | 221 |
| HAQBZ89 | 949061 | 492 | HMMER | PFAM: | PF00202 | 62.49 | 68 | 325 |
| | | | 1.8 | Aminotransferases class- | | | | |
| | | | | III pyridoxal-phosphate | | | | |
| | | | blastx.2 | CG8745 PROTEIN. | sp\|Q9VU95\|Q9VU95 | 52% | 8 | 316 |
| HELHF07 | 949067 | 196 | HMMER | PFAM: | PF00202 | 38.85 | 95 | 295 |
| | | | 1.8 | Aminotransferases class- | | | | |
| | | | | III pyridoxal-phosphate | | | | |
| | | | blastx.14 | 4-aminobutyrate | gi\|1742132\|dbj\|BAA14871.1\| | 85% | 83 | 295 |
| | | | | aminotransferase (EC | | 92% | 21 | 98 |
| | | | | 2.6.1.19) 11 | | 45% | 246 | 311 |
| | | | | aminotransferase). | | 100% | 1 | 18 |
| | | | | [Escherichia coli] | | | | |
| HE9QQ22 | 1127726 | 197 | blastx.14 | (AB002584) beta-alanine- | gi\|1944136\|dbj\|BAA19549.1\| | 77% | 92 | 418 |
| | | | | pyruvate aminotransferase 1 | | 80% | 418 | 585 |
| | | | | | | 85% | 587 | 628 |
| | | | | | | 100% | 677 | 697 |
| HE9QQ22 | 949080 | 493 | HMMER | PFAM: | PF00202 | 105.1 | 285 | 545 |
| | | | 2.1.1 | Aminotransferases class- | | | | |
| | | | | III pyridoxal-phosphate | | | | |
| | | | blastx.2 | ALANINE - | sp\|Q64565\|AGT2_{—} | 51% | 3 | 1070 |
| | | | | GLYOXYLATE | RAT | 43% | 545 | 1003 |
| | | | | AMINOTRANSFERASE | | 49% | 682 | 999 |
| | | | | 2 PRECURSOR (EC 11 | | | | |
| HSDSB06 | 949151 | 494 | HMMER | PFAM: SH3 domain | PF00018 | 249.3 | 483 | 647 |
| | | | 2.1.1 | | | | | |
| | | | blastx.2 | (AL133047) hypothetical | emb\|CAB61374.1\| | 98% | 3 | 863 |
| | | | | protein [Homo sapiens] | | 30% | 6 | 848 |
| | | | | | | 33% | 222 | 848 |
| HACAD35 | 949199 | 199 | HMMER | PFAM: von Willebrand | PF00092 | 70.8 | 1461 | 1174 |
| | | | 2.1.1 | factor type A domain | | | | |
| | | | blastx.2 | SIMILAR TO COCH- | sp\|Q9UDN0\|Q9UDN0 | 99% | 1464 | 952 |
| | | | | 5B2. | | 100% | 947 | 648 |
| | | | | | | 95% | 657 | 457 |
| | | | | | | 22% | 944 | 663 |
| | | | | | | 50% | 1005 | 952 |
| HEQAP17 | 949358 | 200 | HMMER | PFAM: 7 transmembrane | PF00001 | 94.57 | 741 | 436 |
| | | | 1.8 | receptor (rhodopsin | | | | |
| | | | | family) | | | | |
| | | | blastx.2 | Orphan seven- | sp\|AAF59827\|AAF59827 | 84% | 786 | 295 |
| | | | | transmembrane receptor. | | | | |
| HMTBB17 | 950884 | 495 | HMMER | PFAM: EF hand | PF00036 | 15.74 | 285 | 202 |
| | | | 1.8 | | | | | |
| | | | blastx.2 | CDNA FLJ10466 FIS, | sp\|BAA91628\|BAA91628 | 100% | 513 | 100 |
| | | | | CLONE NT2RP1001665. | | | | |
| HKGDE58 | 945039 | 496 | blastx.2 | CDNA FLJ10466 FIS, | sp\|BAA91628\|BAA91628 | 86% | 17 | 835 |
| | | | | CLONE NT2RP1001665. | | 30% | 281 | 691 |
| | | | | | | 55% | 697 | 825 |
| | | | | | | 36% | 690 | 914 |
| | | | | | | 35% | 32 | 208 |
| HKGDE58 | 950885 | 497 | HMMER | PFAM: EF hand | PF00036 | 15.98 | 304 | 221 |
| | | | 1.8 | | | | | |
| | | | blastx.14 | (AJ133836) calmodulin 2 | gi\|4581211\|emb\|CAB40132.1\| | 28% | 337 | 179 |
| | | | | [Branchiostoma floridae] | | 37% | 166 | 119 |
| HCHMW40 | 1144323 | 203 | blastx.14 | calmodulin [Plasmodium | gi\|385234\|gb\|AAA29508.1 | 60% | 376 | 564 |
| | | | | falciparum] | | 49% | 136 | 348 |
| | | | | | | 38% | 349 | 573 |
| | | | | | | 36% | 157 | 345 |
| | | | | | | 32% | 481 | 564 |
| HCHMW40 | 951518 | 498 | HMMER | PFAM: EF hand | PF00036 | 129.9 | 486 | 572 |
| | | | 2.1.1 | | | | | |
| | | | blastx.2 | Calmodulin-like skin | sp\|AAF66821\|AAF66821 | 98% | 135 | 572 |
| | | | | protein. | | | | |
| HE8QZ34 | 1143411 | 204 | blastx.14 | predicted using | gi\|3875264\|emb\|CAB01132.1\| | 39% | 941 | 1201 |
| | | | | Genefinder; similar to EF | | 50% | 437 | 595 |
| | | | | hand (2 domains) | | 40% | 695 | 877 |
| | | | | [Caenorhabditis elegans] | | 32% | 227 | 412 |
| | | | | | | 26% | 1082 | 1183 |
| HE8QZ34 | 952283 | 499 | HMMER | PFAM: EF hand | PF00036 | 12.97 | 543 | 617 |
| | | | 1.8 | | | | | |
| | | | blastx.2 | CG4662 PROTEIN. | sp\|Q9VDT8\|Q9VDT8 | 38% | 249 | 980 |
| | | | | | | 42% | 249 | 878 |
| | | | | | | 33% | 977 | 1084 |
| HWAFG04 | 1227627 | 205 | blastx.14 | PRO1038. | sp\|AAF71042\|AAF71042 | 56% | 5 | 550 |
| | | | | | | 44% | 536 | 745 |
| HWAFG04 | 952878 | 500 | HMMER | PFAM: Eukaryotic protein | PF00069 | 93.74 | 1655 | 945 |
| | | | 1.8 | kinase domain | | | | |
| | | | blastx.14 | (AC002343) Ser/Thr | gi\|2262107\|gb\|AAB63615.1 | 41% | 1655 | 1383 |
| | | | | protein kinase isolog | | 48% | 1319 | 1185 |
| | | | | [Arabidopsis thaliana] | | 42% | 1046 | 933 |
| | | | | | | 75% | 1355 | 1332 |
| HTEKT33 | 953308 | 501 | HMMER | PFAM: Eukaryotic protein | PF00069 | 200.58 | 428 | 1393 |
| | | | 1.8 | kinase domain | | | | |
| | | | blastx.2 | (AC007661) putative | gb\|AAD32787.1\|AC007661_24 | 41% | 722 | 1009 |
| | | | | protein kinase | | 36% | 1070 | 1243 |
| | | | | [Arabidopsis thaliana] | | 29% | 428 | 628 |
| HBXDM07 | 953622 | 502 | HMMER | PFAM: Sec1 family | PF00995 | 96.7 | 267 | 575 |
| | | | 2.1.1 | | | | | |
| | | | blastx.2 | Vacuolar protein sorting | sp\|AAF91174\|AAF91174 | 83% | 141 | 728 |
| | | | | 33B. | | 97% | 1 | 141 |
| | | | | | | 35% | 587 | 706 |
| HFPFA83 | 955614 | 208 | HMMER | PFAM: 7 transmembrane | PF00001 | 107.6 | 316 | 681 |
| | | | 1.8 | receptor (rhodopsin | | | | |
| | | | | family) | | | | |
| | | | blastx.2 | G-protein coupled | pir\|JC7289\|JC7289 | 98% | 202 | 735 |
| | | | | receptor, SREB3 - human | | | | |
| HKADO36 | 956115 | 503 | HMMER | PFAM: Sugar (and other) | PF00083 | 44.03 | 2 | 277 |
| | | | 1.8 | transporters | | | | |
| HFXKG51 | 956596 | 210 | HMMER | PFAM: Sugar (and other) | PF00083 | 121.54 | 506 | 147 |
| | | | 1.8 | transporters | | | | |
| | | | blastx.2 | No definition line found | gb\|AAB18499.1\| | 100% | 560 | 982 |
| | | | | [Escherichia coli] | | | | |
| HFPHR82 | 957528 | 504 | HMMER | PFAM: Actin | PF00022 | 91.7 | 1322 | 357 |
| | | | 2.1.1 | | | | | |
| | | | blastx.2 | Uncharacterized | sp\|AAF67655\|AAF67655 | 100% | 1523 | 273 |
| | | | | hypothalamus protein | | | | |
| | | | | HARP11. | | | | |
| HISAF59 | 959140 | 212 | HMMER | PFAM: Eukaryotic protein | PF00069 | 89.46 | 340 | 771 |
| | | | 1.8 | kinase domain | | | | |
| | | | blastx.14 | (AC002343) Ser/Thr | gi\|2262107\|gb\|AAB63615.1\| | 39% | 460 | 768 |
| | | | | protein kinase isolog | | 33% | 397 | 468 |
| | | | | [Arabidopsis thaliana] | | | | |
| HCEHD66 | 1136122 | 213 | blastx.14 | neuronal calcium sensor | gi\|498032\|gb\|AAA88510.1\| | 98% | 2 | 562 |
| | | | | [Rattus norvegicus] | | | | |
| HCEHD66 | 959160 | 505 | HMMER | PFAM: EF hand | PF00036 | 64.2 | 311 | 397 |
| | | | 2.1.1 | | | | | |
| | | | blastx.2 | Neuronal calcium sensor-1. | sp\|AAD01642\|AAD01642 | 100% | 14 | 583 |
| HE8UY74 | 1163590 | 214 | blastx.14 | (AF080119) contains | gi\|3600036\|gb\|AAC35524.1\| | 38% | 13 | 291 |
| | | | | similarity to protein | | 68% | 367 | 441 |
| | | | | kinase 1 | | 61% | 464 | 502 |
| HE8UY74 | 960914 | 506 | HMMER | PFAM: Eukaryotic protein | PF00069 | 36.37 | 114 | 407 |
| | | | 1.8 | kinase domain | | | | |
| | | | blastx.14 | (AF080119) contains | gi\|3600036\|gb\|AAC35524.1\| | 36% | 117 | 290 |
| | | | | similarity to protein | | 45% | 13 | 111 |
| | | | | kinase 1 | | 73% | 366 | 410 |
| | | | | | | 37% | 467 | 553 |
| HAHIY08 | 962113 | 215 | HMMER | PFAM: Eukaryotic protein | PF00069 | 74.92 | 39 | 278 |
| | | | 1.8 | kinase domain | | | | |
| | | | blastx.14 | similar to tyrosine kinase | gi\|470364\|gb\|AAC47047.1\| | 44% | 192 | 278 |
| | | | | [Caenorhabditis elegans] | | 64% | 18 | 92 |
| | | | | | | 58% | 108 | 179 |
| H2CBH45 | 963811 | 507 | HMMER | PFAM: Src homology | PF00018 | 13 | 194 | 310 |
| | | | 1.8 | domain 3 | | | | |
| | | | blastx.2 | Kryn [Mus musculus] | dbj\|BAA19686.1\| | 85% | 2 | 373 |
| | | | | | | 79% | 381 | 467 |
| | | | | | | 87% | 460 | 483 |
| | | | | | | 70% | 131 | 160 |
| HMVAM09 | 963814 | 508 | HMMER | PFAM: Src homology | PF00018 | 4.79 | 728 | 802 |
| | | | 1.8 | domain 3 | | | | |
| | | | blastx.2 | (AK001580) unnamed | dbj\|BAA91769.1\| | 96% | 20 | 802 |
| | | | | protein product [Homo | | | | |
| | | | | sapiens] | | | | |
| HFPEN04 | 1199663 | 218 | blastx.14 | CG8745 PROTEIN. | sp\|Q9VU95\|Q9VU95 | 65% | 156 | 617 |
| | | | | | | 60% | 696 | 938 |
| | | | | | | 65% | 948 | 1121 |
| | | | | | | 66% | 1335 | 1415 |
| | | | | | | 35% | 1164 | 1331 |
| | | | | | | 50% | 612 | 689 |
| HFPEN04 | 964824 | 509 | HMMER | PFAM: | PF00202 | 33.54 | 259 | 489 |
| | | | 1.8 | Aminotransferases class- | | | | |
| | | | | III pyridoxal-phosphate | | | | |
| | | | blastx.2 | CG8745 PROTEIN. | sp\|Q9VU95\|Q9VU95 | 62% | 148 | 492 |
| HSLJD02 | 1104452 | 219 | blastx.14 | UhpC protein [Escherichia | gi\|148114\|gb\|AAA24722.1\| | 95% | 145 | 927 |
| | | | | coli] | | | | |
| HSLJD02 | 965826 | 510 | HMMER | PFAM: Sugar (and other) | PF00083 | 19.53 | 464 | 874 |
| | | | 1.8 | transporters | | | | |
| | | | blastx.2 | UhpC protein [Escherichia | gb\|AAA24722.1\| | 100% | 56 | 907 |
| | | | | coli] | | | | |
| HDPFZ30 | 1220164 | 220 | blastx.14 | Sulfate transporter. | sp\|CAC05432\|CAC05432 | 55% | 1684 | 1517 |
| | | | | | | 48% | 1433 | 1335 |
| | | | | | | 32% | 1154 | 996 |
| | | | | | | 50% | 180 | 139 |
| | | | | | | 35% | 1199 | 1140 |
| HDPFZ30 | 966752 | 511 | HMMER | PFAM: Sulfate transporter | PF00916 | 60.2 | 1496 | 1233 |
| | | | 2.1.1 | family | | | | |
| | | | blastx.2 | (AF180728) sulfate | gb\|AAD53951.1\| | 28% | 175 | 807 |
| | | | | transporter [Drosophila | | 52% | 14 | 196 |
| | | | | melanogaster] | | | | |
| HPJCR33 | 966758 | 512 | HMMER | PFAM: C2 domain | PF00168 | 31.15 | 13 | 267 |
| | | | 1.8 | | | | | |
| | | | blastx.2 | E3 UBIQUITIN LIGASE | sp\|Q9UJT8\|Q9UJT8 | 89% | 7 | 375 |
| | | | | SMURF1 (FRAGMENT). | | | | |
| HTOAK34 | 966800 | 513 | HMMER | PFAM: Eukaryotic protein | PF00069 | 32.41 | 1020 | 1190 |
| | | | 1.8 | kinase domain | | | | |
| | | | blastx.14 | (AF084205) | gi\|3452473\|gb\|AAC71014.1\| | 75% | 954 | 1190 |
| | | | | serine/threonine protein | | | | |
| | | | | kinase TAO1 [Rattus | | | | |
| | | | | norvegicus] | | | | |
| HE8NI24 | 971296 | 223 | HMMER | PFAM: 7 transmembrane | PF00001 | 61.74 | 453 | 707 |
| | | | 1.8 | receptor (rhodopsin | | | | |
| | | | | family) | | | | |
| | | | blastx.2 | G-protein coupled | pir\|T47131\|T47131 | 93% | 345 | 707 |
| | | | | receptor, SREB2 - human | | 88% | 722 | 748 |
| HAMFM39 | 1055532 | 224 | blastx.14 | (AK001509) unnamed | gi\|7022807\|dbj\|BAA91729.1\| | 53% | 3860 | 3432 |
| | | | | protein product [Homo | | 100% | 4171 | 4106 |
| | | | | sapiens] | | | | |
| HAMFM39 | 971347 | 514 | HMMER | PFAM: Src homology | PF00018 | 67.14 | 1136 | 1306 |
| | | | 1.8 | domain 3 | | | | |
| | | | blastx.2 | (AK001509) unnamed | dbj\|BAA91729.1\| | 59% | 4511 | 4017 |
| | | | | protein product [Homo | | | | |
| | | | | sapiens] | | | | |
| HBGMG39 | 971414 | 515 | HMMER | PFAM: EF hand | PF00036 | 10.69 | 61 | 141 |
| | | | 1.8 | | | | | |
| | | | blastx.2 | 45 KDA CALCIUM- | sp\|Q61112\|CB45_MOUSE | 94% | 7 | 165 |
| | | | | BINDING PROTEIN | | | | |
| | | | | PRECURSOR | | | | |
| | | | | (STROMAL 1 | | | | |
| HSXBV89 | 1128699 | 226 | blastx.2 | TYPE I | sp\|Q9UJ47\|Q9UJ47 | 93% | 7 | 2037 |
| | | | | TRANSMEMBRANE | | 29% | 313 | 1044 |
| | | | | RECEPTOR | | 29% | 742 | 1464 |
| | | | | PRECURSOR. | | | | |
| HSXBV89 | 971821 | 516 | HMMER | PFAM: Sushi domain | PF00084 | 43.6 | 123 | 290 |
| | | | 2.1.1 | (SCR repeat) | | | | |
| | | | blastx.2 | TYPE I | sp\|Q9UJ47\|Q9UJ47 | 82% | 3 | 635 |
| | | | | TRANSMEMBRANE | | 32% | 96 | 536 |
| | | | | RECEPTOR | | | | |
| | | | | PRECURSOR. | | | | |
| HBIOZ10 | 1143756 | 227 | blastx.14 | (AF003134) strong | gi\|2088685\|gb\|AAB54139.1\| | 43% | 3 | 497 |
| | | | | similarity to the | | | | |
| | | | | CDC2/CDX 1 | | | | |
| HBIOZ10 | 973131 | 517 | HMMER | PFAM: Eukaryotic protein | PF00069 | 121.1 | 3 | 365 |
| | | | 1.8 | kinase domain | | | | |
| | | | blastx.2 | (AF003134) strong | gb\|AAB54139.1\| | 60% | 3 | 305 |
| | | | | similarity to the | | | | |
| | | | | CDC2/CDX subfamily of | | | | |
| | | | | ser/thr protein kinases | | | | |
| | | | | [Caenorhabditis elegans] | | | | |
| HTLEJ11 | 1085651 | 228 | blastx.14 | (AF144573) Mx- | gi\|4868443\|gb\|AAD31319.1\| | 69% | 35 | 268 |
| | | | | interacting protein kinase | AF144573_1 | 40% | 437 | 592 |
| | | | | PKM [Mesocricetus | | 42% | 293 | 397 |
| | | | | auratus] | | 38% | 877 | 939 |
| HTLEJ11 | 973302 | 518 | HMMER | PFAM: Eukaryotic protein | PF00069 | 55.9 | 44 | 223 |
| | | | 2.1.1 | kinase domain | | | | |
| | | | blastx.14 | (AF144573) Mx- | gi\|4868443\|gb\|AAD31319.1\| | 69% | 35 | 268 |
| | | | | interacting protein kinase | AF144573_1 | 40% | 437 | 592 |
| | | | | PKM [Mesocricetus | | 42% | 293 | 397 |
| | | | | auratus] | | 38% | 877 | 939 |
| HAWAM69 | 1207835 | 229 | blastx.14 | SPARC-RELATED | sp\|Q9WVN9\|Q9WVN9 | 63% | 580 | 972 |
| | | | | PROTEIN. | | 53% | 193 | 438 |
| | | | | | | 53% | 961 | 1224 |
| | | | | | | 52% | 49 | 198 |
| | | | | | | 48% | 223 | 333 |
| | | | | | | 46% | 640 | 756 |
| | | | | | | 23% | 382 | 624 |
| | | | | | | 34% | 343 | 411 |
| | | | | | | 50% | 604 | 657 |
| | | | | | | 33% | 760 | 831 |
| | | | | | | 28% | 1025 | 1120 |
| | | | | | | 38% | 2238 | 2300 |
| HAWAM69 | 943104 | 519 | blastx.2 | SPARC-RELATED | sp\|Q9WVN9\|Q9WVN9 | 51% | 31 | 261 |
| | | | | PROTEIN. | | | | |
| HAWAM69 | 973465 | 520 | HMMER | PFAM: EF hand | PF00036 | 10.13 | 97 | 26 |
| | | | 1.8 | | | | | |
| | | | blastx.14 | (AF070470) SPARC- | gi\|5305327\|gb\|AAD41590.1\| | 62% | 133 | 5 |
| | | | | related protein [Mus | AF070470_1 | | | |
| | | | | musculus] | | | | |
| HSCKD11 | 1056288 | 230 | blastx.14 | (AJ243342) nicotinic | gi\|6688136\|emb\|CAB65091.1\| | 98% | 1292 | 1831 |
| | | | | acetylcholine receptor | | 88% | 2347 | 2886 |
| | | | | alpha 9 subunit [Homo | | 100% | 54 | 203 |
| | | | | sapiens] | | 33% | 3000 | 3107 |
| | | | | | | 35% | 2938 | 2988 |
| HSCKD11 | 973894 | 521 | HMMER | PFAM: Neurotransmitter- | PF00065 | 31.56 | 147 | 257 |
| | | | 1.8 | gated ion-channel | | | | |
| | | | blastx.2 | (AJ243342) nicotinic | emb\|CAB65091.1\| | 90% | 120 | 296 |
| | | | | acetylcholine receptor | | | | |
| | | | | alpha 9 subunit [Homo | | | | |
| | | | | sapiens] | | | | |
| HDPLT62 | 973945 | 522 | HMMER | PFAM: Neurotransmitter- | PF00065 | 102.12 | 417 | 746 |
| | | | 1.8 | gated ion-channel | | | | |
| | | | blastx | GABA receptor rho-3 | dbj\|BAA09322.1\| | 78% | 414 | 797 |
| | | | | subunit precursor [Rattus | | 92% | 262 | 411 |
| | | | | norvegicus] | | | | |
| HTPFX16 | 974296 | 232 | HMMER | PFAM: PMP- | PF00822 | 50.2 | 48 | 299 |
| | | | 2.1.1 | 22/EMP/MP20/Claudin | | | | |
| | | | | family | | | | |
| | | | blastx.2 | CLAUDIN-18. | sp\|P56857\|CLDI_MOUSE | 67% | 39 | 359 |
| | | | | | | 44% | 316 | 483 |
| HE9NO66 | 1079624 | 233 | blastx.14 | (AB035267) Nck- | gi\|6472874\|dbj\|BAA87066.1\| | 82% | 449 | 775 |
| | | | | interacting kinase-like | | 94% | 2 | 283 |
| | | | | embryo specific kinase | | 80% | 748 | 990 |
| | | | | [Mus musculus] | | | | |
| HE9NO66 | 974353 | 523 | HMMER | PFAM: Eukaryotic protein | PF00069 | 121.6 | 473 | 757 |
| | | | 1.8 | kinase domain | | | | |
| | | | blastx.14 | (AB020741) NIK-related | gi\|6009519\|dbj\|BAA84943.1 | 73% | 449 | 817 |
| | | | | kinase [Mus musculus] | | 94% | 2 | 283 |
| | | | | | | 79% | 748 | 990 |
| HSDJI44 | 1154068 | 234 | blastx.14 | (AE000180) 7,8- | gi\|1786991\|gb\|AAC73861.1\| | 94% | 803 | 1849 |
| | | | | diaminopelargonic acid | | 98% | 1828 | 2088 |
| | | | | synthetase [Escherichia | | | | |
| | | | | coli] | | | | |
| HSDJI44 | 974784 | 524 | HMMER | PFAM: | PF00202 | 511.4 | 894 | 1835 |
| | | | 2.1.1 | Aminotransferases class- | | | | |
| | | | | III pyridoxal-phosphate | | | | |
| | | | blastx.14 | (AE000180) 7,8- | gi\|1786991\|gb\|AAC73861.1\| | 99% | 795 | 1841 |
| | | | | diaminopelargonic acid | | 100% | 1837 | 1860 |
| | | | | synthetase [Escherichia | | | | |
| | | | | coli] | | | | |
| HFXDP53 | 578868 | 525 | HMMER | PFAM: CUB domain | PF00431 | 11.77 | 21 | 77 |
| | | | 1.8 | | | | | |
| HWADY66 | 734565 | 236 | HMMER | PFAM: Eukaryotic protein | PF00069 | 28.82 | 1 | 174 |
| | | | 1.8 | kinase domain | | | | |
| HLDBC63 | 1144557 | 237 | blastx.14 | carnitine | gi\|755646\|gb\|AAC41748.1\| | 99% | 3 | 629 |
| | | | | palmitoyltransferase I | | | | |
| | | | | [Homo sapiens] | | | | |
| HLDBC63 | 745061 | 526 | HMMER | PFAM: Carnitate | PF00755 | 258.4 | 3 | 410 |
| | | | 2.1.1 | acyltransferase | | | | |
| HFIVB68 | 752981 | 527 | HMMER | PFAM: C2 domain | PF00168 | 35.53 | 406 | 570 |
| | | | 1.8 | | | | | |
| | | | blastx.2 | hypothetical protein | pir\|T12449\|T12449 | 93% | 187 | 615 |
| | | | | DKFZp564E1616.1 - | | 97% | 692 | 835 |
| | | | | human (fragments) | | 97% | 588 | 692 |
| | | | | | | 96% | 104 | 184 |
| | | | | | | 68% | 3 | 107 |
| | | | | | | 36% | 573 | 668 |
| | | | | | | 27% | 406 | 543 |
| | | | | | | 36% | 397 | 465 |
| | | | | | | 54% | 125 | 157 |
| HTLAC56 | 1181355 | 239 | blastx.14 | carnitine | gi\|755646\|gb\|AAC41748.1\| | 54% | 6 | 599 |
| | | | | palmitoyltransferase I | | | | |
| | | | | [Homo sapiens] | | | | |
| HTLAC56 | 753093 | 528 | HMMER | PFAM: Carnitate | PF00755 | 143.3 | 6 | 422 |
| | | | 2.1.1 | acyltransferase | | | | |
| HSSAD41 | 753094 | 240 | HMMER | PFAM: Carnitate | PF00755 | 90.8 | 51 | 299 |
| | | | 2.1.1 | acyltransferase | | | | |
| HCFMT57 | 765375 | 529 | HMMER | PFAM: Src homology | PF00018 | 14.55 | 107 | 3 |
| | | | 1.8 | domain 3 | | | | |
| | | | blastx.2 | (AF039571) peripheral | gb\|AAD11957.1\| | 96% | 377 | 3 |
| | | | | benzodiazepine receptor | | | | |
| | | | | interacting protein; PBR- | | | | |
| | | | | IP/PRAX1 [Homo | | | | |
| | | | | sapiens] | | | | |
| HDAAV61 | 810305 | 530 | HMMER | PFAM: Eukaryotic protein | PF00069 | 41.11 | 11 | 145 |
| | | | 1.8 | kinase domain | | | | |
| HDPKD75 | 1096253 | 243 | blastx.14 | (AF191838) TANK | gi\|6224868\|gb\|AAF05989.1\| | 100% | 74 | 637 |
| | | | | binding kinase TBK1 | AF191838_1 | | | |
| | | | | [Homo sapiens] | | | | |
| HDPKD75 | 810824 | 531 | HMMER | PFAM: Eukaryotic protein | PF00069 | 98.74 | 68 | 433 |
| | | | 1.8 | kinase domain | | | | |
| HTEON29 | 1126312 | 244 | blastx.14 | (AB021866) CIB [Homo | gi\|4092850\|dbj\|BAA36281.1\| | 50% | 190 | 339 |
| | | | | sapiens] | | 47% | 394 | 501 |
| | | | | | | 57% | 103 | 186 |
| | | | | | | 48% | 1 | 111 |
| HTEON29 | 815852 | 532 | HMMER | PFAM: EF hand | PF00036 | 22.29 | 266 | 349 |
| | | | 1.8 | | | | | |
| | | | blastx.2 | CALCIUM-AND | sp\|Q9R010\|Q9R010 | 41% | 2 | 496 |
| | | | | INTEGRIN-BINDING | | | | |
| | | | | PROTEIN CIB. | | | | |
| HSKAC24 | 1121800 | 245 | blastx.14 | (AF144573) Mx- | gi\|4868443\|gb\|AAD31319.1\| | 94% | 37 | 453 |
| | | | | interacting protein kinase | AF144573_1 | 77% | 464 | 490 |
| | | | | PKM [Mesocricetus | | 100% | 17 | 43 |
| | | | | auratus] | | 88% | 484 | 510 |
| HSKAC24 | 823869 | 533 | HMMER | PFAM: Eukaryotic protein | PF00069 | 79.36 | 122 | 454 |
| | | | 1.8 | kinase domain | | | | |
| HTJAA71 | 846682 | 534 | HMMER | PFAM: S-100/ICaBP type | PF01023 | 36.3 | 77 | 208 |
| | | | 2.1.1 | calcium binding domain | | | | |
| | | | blastx.2 | TUMOR RELATED | sp\|Q9UBG3\|Q9UBG3 | 70% | 68 | 325 |
| | | | | PROTEIN. | | | | |
| HTEKS20 | 1124378 | 247 | blastx.14 | calcineurin [Bos taurus] | gi\|312969\|emb\|CAA50659.1\| | 77% | 53 | 562 |
| HTEKS20 | 846714 | 535 | HMMER | PFAM: EF hand | PF00036 | 84.7 | 453 | 539 |
| | | | 2.1.1 | | | | | |
| | | | blastx.2 | calcineurin regulatory | pir\|A33391\|A33391 | 77% | 60 | 569 |
| | | | | chain - human | | | | |
| HE9TK49 | 856343 | 536 | HMMER | PFAM: Ion transport | PF00520 | 77.02 | 11 | 256 |
| | | | 1.8 | proteins | | | | |
| | | | blastx.2 | (AB012043) NBR13 | dbj\|BAA36409.1\| | 95% | 2 | 256 |
| | | | | [Homo sapiens] | | 50% | 256 | 327 |
| | | | | | | 37% | 259 | 282 |
| HCHAT01 | 867209 | 537 | HMMER | PFAM: EF hand | PF00036 | 24.01 | 1227 | 1304 |
| | | | 1.8 | | | | | |
| | | | blastx.2 | AD 3 (FRAGMENT). | sp\|Q9UQ32\|Q9UQ32 | 47% | 795 | 1409 |
| | | | | | | 72% | 14 | 367 |
| | | | | | | 57% | 472 | 783 |
| | | | | | | 79% | 375 | 476 |
| HCEEN06 | 1150867 | 250 | blastx.14 | (AB025258) granuphilin-a | gi\|5926736\|dbj\|BAA84656.1\| | 32% | 296 | 490 |
| | | | | [Mus musculus] | | 48% | 548 | 652 |
| | | | | | | 47% | 242 | 298 |
| | | | | | | 42% | 152 | 229 |
| HCEEN06 | 878658 | 538 | HMMER | PFAM: C2 domain | PF00168 | 51.79 | 203 | 466 |
| | | | 1.8 | | | | | |
| HDPKI83 | 883382 | 251 | HMMER | PFAM: C2 domain | PF00168 | 13.47 | 530 | 601 |
| | | | 1.8 | | | | | |
| | | | blastx.2 | MUNC13-4 PROTEIN. | sp\|Q9R189\|Q9R189 | 76% | 194 | 631 |
| | | | | | | 95% | 735 | 794 |
| | | | | | | 80% | 661 | 738 |
| HSPBQ12 | 1152258 | 252 | blastx.14 | copine I [Homo sapiens] | gi\|1791257\|gb\|AAC15920.1\| | 73% | 55 | 570 |
| | | | | | | 63% | 570 | 851 |
| HSPBQ12 | 884004 | 539 | HMMER | PFAM: C2 domain | PF00168 | 42.06 | 352 | 624 |
| | | | 1.8 | | | | | |
| HPCID78 | 886915 | 253 | HMMER | PFAM: Sulfate transporter | PF00916 | 26.4 | 265 | 381 |
| | | | 2.1.1 | family | | | | |
| | | | blastx.2 | (AF030880) pendrin | gb\|AAC51873.1\| | 40% | 25 | 375 |
| | | | | [Homo sapiens] | | | | |
| HDTKQ14 | 886936 | 254 | HMMER | PFAM: Src homology | PF00018 | 12.87 | 430 | 546 |
| | | | 1.8 | domain 3 | | | | |
| | | | blastx.2 | (AL049683) hypothetical | emb\|CAB41255.1\| | 100% | 439 | 555 |
| | | | | protein [Homo sapiens] | | 56% | 76 | 291 |
| HRACK83 | 888037 | 255 | HMMER | PFAM: Eukaryotic protein | PF00069 | 48.4 | 211 | 423 |
| | | | 1.8 | kinase domain | | | | |
| HSIAO78 | 889498 | 540 | HMMER | PFAM: EF hand | PF00036 | 19.91 | 389 | 463 |
| | | | 1.8 | | | | | |
| | | | blastx.2 | HYPOTHETICAL 22.5 KDA | sp\|O43745\|O43745 | 97% | 38 | 622 |
| | | | | PROTEIN. | | | | |
| HWAGS73 | 894404 | 257 | HMMER | PFAM: Eukaryotic protein | PF00069 | 64.17 | 4 | 273 |
| | | | 1.8 | kinase domain | | | | |
| HCMSL08 | 898203 | 258 | HMMER | PFAM: Calsequestrin | PF01216 | 1001.1 | 52 | 1221 |
| | | | 2.1.1 | | | | | |
| | | | blastx.2 | calsequestrin precursor, | pir\|A60424\|A60424 | 95% | 112 | 1197 |
| | | | | fast skeletal muscle - | | | | |
| | | | | human | | | | |
| HCMSL08 | 959176 | 541 | HMMER | PFAM: Calsequestrin | PF01216 | 697.4 | 1372 | 569 |
| | | | 2.1.1 | | | | | |
| | | | blastx.14 | calmitine; calsequestrine | gi\|688292\|gb\|AAB32063.1\| | 93% | 1372 | 593 |
| | | | | [Homo sapiens] | | | | |
| HLWFN63 | 1101533 | 259 | blastx.14 | (AL049683) hypothetical | gi\|4678753\|emb\|CAB41255.1\| | 45% | 470 | 937 |
| | | | | protein [Homo sapiens] | | 75% | 989 | 1024 |
| HLWFN63 | 908437 | 542 | HMMER | PFAM: Src homology | PF00018 | 12.81 | 515 | 664 |
| | | | 1.8 | domain 3 | | | | |
| | | | blastx.2 | (AL049683) hypothetical | emb\|CAB41255.1\| | 44% | 464 | 1024 |
| | | | | protein [Homo sapiens] | | | | |
| HPWAY10 | 908549 | 543 | HMMER | PFAM: KRAB box | PF01352 | 156.3 | 206 | 394 |
| | | | 2.1.1 | | | | | |
| | | | blastx.14 | zinc finger protein 30 | gi\|456269\|emb\|CAA82913.1\| | 70% | 152 | 325 |
| | | | | [Mus musculus | | 67% | 326 | 454 |
| | | | | domesticus] | | | | |
| HOUDH19 | 1153909 | 261 | blastx.14 | (AC007842) BC331191_1 | gi\|5080758\|gb\|AAD39268.1\| | 100% | 57 | 335 |
| | | | | [Homo sapiens] | AC007842_3 | | | |
| HOUDH19 | 908588 | 544 | HMMER | PFAM: KRAB box | PF01352 | 169.7 | 241 | 429 |
| | | | 2.1.1 | | | | | |
| | | | blastx.2 | (AC007842) BC331191_1 | gb\|AAD39268.1\|AC007842_3 | 91% | 226 | 549 |
| | | | | [Homo sapiens] | | | | |
| HDPFF24 | 909232 | 545 | HMMER | PFAM: KRAB box | PF01352 | 121.3 | 158 | 349 |
| | | | 2.1.1 | | | | | |
| | | | blastx.2 | (AC007228) R31665_2 | gb\|AAD23606.1\|AC007228_1 | 50% | 158 | 457 |
| | | | | [AA 1-673] [Homo | | | | |
| | | | | sapiens] | | | | |
| HWLFH94 | 1152278 | 263 | blastx.14 | (AK000265) unnamed | gi\|7020230\|dbj\|BAA91041.1\| | 41% | 739 | 939 |
| | | | | protein product [Homo | | 53% | 595 | 690 |
| | | | | sapiens] | | 57% | 335 | 397 |
| HWLFH94 | 909682 | 546 | HMMER | PFAM: Src homology | PF00018 | 58.42 | 308 | 463 |
| | | | 1.8 | domain 3 | | | | |
| | | | blastx.2 | (AK000265) unnamed | dbj\|BAA91041.1\| | 40% | 215 | 535 |
| | | | | protein product [Homo | | | | |
| | | | | sapiens] | | | | |
| HWMBM13 | 1152283 | 264 | blastx.14 | (AK000265) unnamed | gi\|7020230\|dbj\|BAA91041.1\| | 56% | 153 | 296 |
| | | | | protein product [Homo | | 41% | 345 | 545 |
| | | | | sapiens] | | | | |
| HWMBM13 | 909683 | 547 | HMMER | PFAM: Src homology | PF00018 | 59.64 | 126 | 281 |
| | | | 1.8 | domain 3 | | | | |
| | | | blastx.2 | Eps8 [Mus musculus] | gb\|AAA16358.1\| | 35% | 33 | 317 |
| | | | | | | 37% | 324 | 527 |
| HFIUE75 | 1172525 | 265 | blastx.14 | (AB037134) IRE homolog | gi\|6729348\|dbj\|BAA89784.1\| | 53% | 868 | 1134 |
| | | | | 1 [Arabidopsis thaliana] | | 40% | 1126 | 1251 |
| | | | | | | 28% | 526 | 684 |
| HFIUE75 | 909758 | 548 | HMMER | PFAM: Eukaryotic protein | PF00069 | 85.68 | 377 | 664 |
| | | | 1.8 | kinase domain | | | | |
| | | | blastx.14 | (AD000092) hypothetical | gi\|1905906\|gb\|AAB51171.1\| | 43% | 362 | 634 |
| | | | | human serine-threonine | | 46% | 632 | 715 |
| | | | | protein kinase R31240_1 | | 47% | 724 | 774 |
| | | | | [Homo sapiens] | | | | |
| HNTCP13 | 909770 | 549 | HMMER | PFAM: Eukaryotic protein | PF00069 | 102.96 | 445 | 930 |
| | | | 1.8 | kinase domain | | | | |
| | | | blastx.14 | (AC006530) unknown | gi\|4809337\|gb\|AAD30182.1\| | 55% | 463 | 957 |
| | | | | [Homo sapiens] | AC006530_4 | | | |
| HBIBQ89 | 909782 | 550 | HMMER | PFAM: SH3 domain | PF00018 | 49.7 | 212 | 376 |
| | | | 2.1.1 | | | | | |
| | | | blastx.2 | p115 [Homo sapiens] | emb\|CAA55394.1\| | 41% | 14 | 397 |
| HWBEG18 | 909798 | 551 | HMMER | PFAM: EF hand | PF00036 | 33.3 | 505 | 591 |
| | | | 2.1.1 | | | | | |
| | | | blastx.2 | RAS ACTIVATOR | sp\|Q9UNN9\|Q9UNN9 | 55% | 103 | 684 |
| | | | | RASGRP. | | 71% | 698 | 889 |
| | | | | | | 48% | 2 | 142 |
| HTAHB43 | 1221956 | 269 | blastx.14 | PUTATIVE RASGAP- | sp\|O43374\|O43374 | 99% | 153 | 2174 |
| | | | | ACTIVATING-LIKE | | 100% | 2174 | 2356 |
| | | | | PROTEIN. | | 97% | 42 | 164 |
| | | | | | | 34% | 45 | 140 |
| | | | | | | 31% | 429 | 524 |
| | | | | | | 57% | 1436 | 1477 |
| HTAHB43 | 909845 | 552 | HMMER | PFAM: GTPase-activator | PF00616 | 61.3 | 519 | 731 |
| | | | 2.1.1 | protein for Ras-like | | | | |
| | | | | GTPase | | | | |
| | | | blastx.2 | PUTATIVE RASGAP- | sp\|O43374\|O43374 | 97% | 39 | 860 |
| | | | | ACTIVATING-LIKE | | 100% | 1 | 33 |
| | | | | PROTEIN. | | | | |
| HSYBX32 | 909846 | 270 | HMMER | PFAM: C2 domain | PF00168 | 41.14 | 46 | 189 |
| | | | 1.8 | | | | | |
| | | | blastx.2 | PUTATIVE RASGAP- | sp\|O43374\|O43374 | 98% | 49 | 228 |
| | | | | ACTIVATING-LIKE | | | | |
| | | | | PROTEIN. | | | | |
| HCEHE35 | 909937 | 553 | HMMER | PFAM: Eukaryotic protein | PF00069 | 30.78 | 210 | 347 |
| | | | 1.8 | kinase domain | | | | |
| | | | blastx.14 | protein kinase PRK2 | gi\|914100\|gb\|AAB33346.1\| | 66% | 204 | 365 |
| | | | | [human, DX3 B-cell | | | | |
| | | | | myeloma cell line, | | | | |
| | | | | Peptide, 984 aa] [Homo | | | | |
| | | | | sapiens] | | | | |
| HFCBB56 | 1204971 | 272 | blastx.14 | inositol 1,4,5- | pir\|S62358\|S62358 | 44% | 280 | 387 |
| | | | | trisphosphate-binding | | 31% | 439 | 612 |
| | | | | protein, 130K - rat | | 26% | 598 | 744 |
| HFCBB56 | 910073 | 554 | HMMER | PFAM: EF hand | PF00036 | 23.95 | 431 | 514 |
| | | | 1.8 | | | | | |
| | | | blastx.2 | 1-phosphatidylinositol- | pir\|S14113\|S14113 | 36% | 275 | 565 |
| | | | | 4,5-bisphosphate | | | | |
| | | | | phosphodiesterase 1 | | | | |
| HAMFL82 | 910074 | 273 | HMMER | PFAM: C2 domain | PF00168 | 73.4 | 9 | 212 |
| | | | 1.8 | | | | | |
| | | | blastx.2 | PHOSPHOLIPASE C-L2. | sp\|Q9QYG1\|Q9QYG1 | 97% | 3 | 317 |
| HBXCM38 | 1174533 | 274 | blastx.14 | unnamed protein product | gi\|6740727\|emb\|CAB69447.1\| | 97% | 405 | 1349 |
| | | | | [unidentified] | | 87% | 13 | 396 |
| HBXCM38 | 910086 | 555 | HMMER | PFAM: Src homology | PF00018 | 55.89 | 1062 | 1232 |
| | | | 1.8 | domain 3 | | | | |
| | | | blastx.2 | unnamed protein product | emb\|CAB69447.1\| | 92% | 402 | 1316 |
| | | | | [unidentified] | | 87% | 13 | 396 |
| | | | | | | 77% | 1295 | 1348 |
| HLHCR16 | 910123 | 275 | HMMER | PFAM: Sushi domain | PF00084 | 744.9 | 197 | 358 |
| | | | 2.1.1 | (SCR repeat) | | | | |
| | | | blastx.2 | complement receptor 1 - | pir\|I36936\|I36936 | 29% | 710 | 1600 |
| | | | | chimpanzee (fragment) | | 30% | 1166 | 1921 |
| | | | | | | 31% | 818 | 1636 |
| | | | | | | 30% | 1958 | 2764 |
| | | | | | | 28% | 710 | 1513 |
| | | | | | | 29% | 1163 | 1921 |
| | | | | | | 29% | 1757 | 2632 |
| | | | | | | 28% | 1766 | 2632 |
| | | | | | | 31% | 911 | 1636 |
| | | | | | | 26% | 1970 | 3031 |
| | | | | | | 27% | 1754 | 2605 |
| | | | | | | 28% | 1166 | 1921 |
| | | | | | | 30% | 2378 | 3031 |
| | | | | | | 36% | 20 | 562 |
| | | | | | | 29% | 1244 | 1921 |
| | | | | | | 26% | 2210 | 3163 |
| | | | | | | 26% | 2210 | 3163 |
| | | | | | | 32% | 11 | 571 |
| | | | | | | 32% | 11 | 571 |
| | | | | | | 32% | 710 | 1204 |
| | | | | | | 32% | 11 | 562 |
| | | | | | | 32% | 710 | 1204 |
| | | | | | | 30% | 23 | 595 |
| | | | | | | 30% | 992 | 1630 |
| | | | | | | 32% | 710 | 1204 |
| | | | | | | 29% | 23 | 595 |
| | | | | | | 36% | 23 | 460 |
| | | | | | | 33% | 20 | 460 |
| | | | | | | 27% | 32 | 844 |
| | | | | | | 29% | 728 | 1387 |
| | | | | | | 30% | 983 | 1549 |
| | | | | | | 28% | 728 | 1387 |
| | | | | | | 31% | 713 | 1246 |
| | | | | | | 32% | 2657 | 3124 |
| | | | | | | 31% | 860 | 1387 |
| | | | | | | 30% | 518 | 1228 |
| | | | | | | 31% | 713 | 1246 |
| | | | | | | 33% | 713 | 1117 |
| | | | | | | 32% | 701 | 1114 |
| | | | | | | 32% | 113 | 574 |
| | | | | | | 32% | 113 | 574 |
| | | | | | | 31% | 2417 | 2983 |
| | | | | | | 30% | 1811 | 2242 |
| | | | | | | 32% | 2642 | 3109 |
| | | | | | | 34% | 80 | 460 |
| | | | | | | 32% | 1244 | 1639 |
| | | | | | | 33% | 701 | 1111 |
| | | | | | | 31% | 95 | 547 |
| | | | | | | 29% | 2219 | 2983 |
| | | | | | | 31% | 2681 | 3130 |
| | | | | | | 29% | 2618 | 3109 |
| | | | | | | 30% | 734 | 1171 |
| | | | | | | 31% | 1109 | 1537 |
| | | | | | | 32% | 80 | 451 |
| | | | | | | 31% | 2219 | 2761 |
| | | | | | | 32% | 725 | 1114 |
| | | | | | | 25% | 1721 | 2452 |
| | | | | | | 29% | 113 | 574 |
| | | | | | | 31% | 725 | 1114 |
| | | | | | | 28% | 1550 | 2113 |
| | | | | | | 26% | 2474 | 3319 |
| | | | | | | 30% | 1472 | 2026 |
| | | | | | | 27% | 1424 | 2113 |
| | | | | | | 25% | 2474 | 3100 |
| | | | | | | 25% | 1721 | 2452 |
| | | | | | | 27% | 1100 | 1639 |
| | | | | | | 29% | 893 | 1363 |
| | | | | | | 35% | 11 | 364 |
| | | | | | | 26% | 1721 | 2326 |
| | | | | | | 27% | 2555 | 3322 |
| | | | | | | 26% | 1721 | 2449 |
| | | | | | | 33% | 182 | 574 |
| | | | | | | 26% | 1100 | 1630 |
| | | | | | | 29% | 2549 | 2938 |
| | | | | | | 30% | 1997 | 2401 |
| | | | | | | 30% | 38 | 424 |
| | | | | | | 32% | 1241 | 1657 |
| | | | | | | 30% | 626 | 1015 |
| | | | | | | 30% | 734 | 1090 |
| | | | | | | 25% | 1250 | 1852 |
| | | | | | | 24% | 1250 | 1852 |
| | | | | | | 30% | 38 | 370 |
| | | | | | | 31% | 95 | 382 |
| | | | | | | 31% | 95 | 382 |
| | | | | | | 31% | 734 | 1090 |
| | | | | | | 26% | 1769 | 2464 |
| | | | | | | 31% | 725 | 1015 |
| | | | | | | 31% | 725 | 1015 |
| | | | | | | 29% | 1799 | 2056 |
| | | | | | | 25% | 1472 | 1882 |
| | | | | | | 30% | 593 | 847 |
| | | | | | | 22% | 371 | 598 |
| HLHCR16 | 965511 | 556 | HMMER | PFAM: Sushi domain | PF00084 | 357.8 | 197 | 358 |
| | | | 2.1.1 | (SCR repeat) | | | | |
| | | | blastx.2 | furrowed [Drosophila | gb\|AAB36703.1\| | 31% | 638 | 1480 |
| | | | | melanogaster] | | 28% | 254 | 1228 |
| | | | | | | 34% | 737 | 1387 |
| | | | | | | 28% | 254 | 1120 |
| | | | | | | 35% | 89 | 604 |
| | | | | | | 32% | 908 | 1468 |
| | | | | | | 34% | 692 | 1189 |
| | | | | | | 30% | 740 | 1270 |
| | | | | | | 30% | 419 | 1018 |
| | | | | | | 32% | 11 | 529 |
| | | | | | | 27% | 17 | 916 |
| | | | | | | 27% | 17 | 553 |
| | | | | | | 34% | 1100 | 1480 |
| | | | | | | 28% | 11 | 445 |
| | | | | | | 30% | 977 | 1480 |
| | | | | | | 37% | 365 | 571 |
| | | | | | | 29% | 1220 | 1489 |
| HE6GF02 | 1153883 | 276 | blastx.14 | (AJ007012) Fish protein | gi\|3702174\|emb\|CAA07416.1\| | 75% | 10 | 192 |
| | | | | [Mus musculus] | | 66% | 202 | 378 |
| | | | | | | 39% | 202 | 375 |
| | | | | | | 39% | 1 | 192 |
| | | | | | | 38% | 13 | 168 |
| | | | | | | 39% | 10 | 168 |
| | | | | | | 41% | 205 | 378 |
| | | | | | | 38% | 223 | 372 |
| | | | | | | 37% | 253 | 324 |
| | | | | | | 50% | 550 | 609 |
| | | | | | | 50% | 273 | 320 |
| | | | | | | 54% | 346 | 378 |
| HE6GF02 | 911263 | 557 | HMMER | PFAM: Src homology | PF00018 | 51.15 | 10 | 174 |
| | | | 1.8 | domain 3 | | | | |
| | | | blastx.2 | (AJ007012) Fish protein | emb\|CAA07416.1\| | 77% | 10 | 186 |
| | | | | [Mus musculus] | | 44% | 201 | 275 |
| HOUFT36 | 1162680 | 277 | blastx.14 | (AF162130) MAGUK | gi\|6997272\|gb\|AAD45919.2\| | 100% | 868 | 1563 |
| | | | | protein TEM-61 [Homo | AF162130_1 | 98% | 422 | 868 |
| | | | | sapiens] | | 87% | 31 | 426 |
| HOUFT36 | 911293 | 558 | HMMER | PFAM: PDZ domain | PF00595 | 35.3 | 322 | 558 |
| | | | 2.1.1 | (Also known as DHR or | | | | |
| | | | | GLGF). | | | | |
| | | | blastx.2 | (AF162130) MAGUK | gb\|AAD45919.2\|AF162130_1 | 91% | 196 | 846 |
| | | | | protein TEM-61 [Homo | | 98% | 23 | 193 |
| | | | | sapiens] | | | | |
| HAGGF84 | 911312 | 559 | HMMER | PFAM: Eukaryotic protein | PF00069 | 105.85 | 10 | 318 |
| | | | 1.8 | kinase domain | | | | |
| | | | blastx.14 | calmodulin-dependent | gi\|3241849\|dbj\|BAA28870.1\| | 88% | 10 | 363 |
| | | | | protein kinase II-delta | | 87% | 366 | 413 |
| | | | | dash [Oryctolagus | | 100% | 320 | 364 |
| | | | | cuniculus] | | | | |
| HTTKP07 | 1119031 | 279 | blastx.14 | (AL049683) hypothetical | gi\|4678753\|emb\|CAB41255.1\| | 63% | 8 | 205 |
| | | | | protein [Homo sapiens] | | 58% | 263 | 451 |
| HTTKP07 | 911390 | 560 | HMMER | PFAM: Src homology | PF00018 | 15.82 | 47 | 196 |
| | | | 1.8 | domain 3 | | | | |
| | | | blastx.2 | (AL049683) hypothetical | emb\|CAB41255.1\| | 51% | 8 | 289 |
| | | | | protein [Homo sapiens] | | 56% | 292 | 450 |
| HE9SE62 | 911476 | 561 | HMMER | PFAM: Src homology | PF00018 | 47.65 | 268 | 435 |
| | | | 1.8 | domain 3 | | | | |
| | | | blastx.2 | (AK000007) FLJ00007 | dbj\|BAA92232.1\| | 43% | 4 | 435 |
| | | | | protein [Homo sapiens] | | 64% | 877 | 927 |
| HUJAD24 | 1162674 | 281 | blastx.14 | serine/threonine kinase | gi\|2052191\|emb\|CAB06295.1\| | 34% | 457 | 777 |
| | | | | [Rattus norvegicus] | | 48% | 363 | 512 |
| | | | | | | 34% | 797 | 928 |
| | | | | | | 57% | 285 | 362 |
| | | | | | | 51% | 141 | 233 |
| | | | | | | 72% | 1679 | 1732 |
| | | | | | | 42% | 9 | 71 |
| | | | | | | 24% | 75 | 224 |
| | | | | | | 72% | 229 | 261 |
| | | | | | | 42% | 180 | 236 |
| HUJAD24 | 911498 | 562 | HMMER | PFAM: Eukaryotic protein | PF00069 | 34.73 | 9 | 215 |
| | | | 1.8 | kinase domain | | | | |
| | | | blastx.14 | AMP-activated protein | gi\|758783\|gb\|AAA64850.1\| | 45% | 336 | 467 |
| | | | | kinase homolog [Homo | | 45% | 123 | 215 |
| | | | | sapiens] | | 37% | 267 | 338 |
| | | | | | | 54% | 211 | 243 |
| | | | | | | 41% | 45 | 95 |
| HWLFG75 | 1228123 | 282 | blastx.14 | DJ63M2.4 (novel protein). | sp\|CAC08483\|CAC08483 | 81% | 472 | 861 |
| | | | | | | 91% | 862 | 1074 |
| | | | | | | 100% | 1140 | 1163 |
| HWLFG75 | 916563 | 563 | HMMER | PFAM: EF hand | PF00036 | 24.1 | 187 | 273 |
| | | | 2.1.1 | | | | | |
| | | | blastx.2 | DJ63M2.4 (novel protein). | sp\|CAC08483\|CAC08483 | 89% | 720 | 1058 |
| | | | | | | 75% | 457 | 717 |
| | | | | | | 100% | 1123 | 1146 |
| HT3BG12 | 921593 | 564 | HMMER | PFAM: Eukaryotic protein | PF00069 | 27.09 | 109 | 183 |
| | | | 1.8 | kinase domain | | | | |
| | | | blastx.14 | CYCLIN-DEPENDENT | gi\|3715669\|emb\|CAA03585.1\| | 85% | 1 | 246 |
| | | | | KINASE (CDK)8 | | | | |
| | | | | [unidentified] | | | | |
| HTLJC71 | 922923 | 284 | HMMER | PFAM: Src homology | PF00018 | 9.14 | 1152 | 1340 |
| | | | 1.8 | domain 3 | | | | |
| | | | blastx.2 | (AL133030) hypothetical | emb\|CAB61362.1\| | 94% | 3 | 1355 |
| | | | | protein [Homo sapiens] | | | | |
| HCOMM05 | 1194701 | 285 | blastx.14 | epidermal growth factor | pir\|I38728\|I38728 | 44% | 455 | 721 |
| | | | | receptor kinase substrate - | | 59% | 188 | 370 |
| | | | | human | | 46% | 722 | 850 |
| | | | | | | 23% | 53 | 232 |
| | | | | | | 36% | 125 | 190 |
| | | | | | | 63% | 1080 | 1112 |
| HCOMM05 | 925952 | 565 | HMMER | PFAM: Src homology | PF00018 | 59.48 | 178 | 342 |
| | | | 1.8 | domain 3 | | | | |
| | | | blastx.2 | epidermal growth factor | gb\|AAA62280.1\| | 46% | 445 | 840 |
| | | | | receptor kinase substrate | | 43% | 115 | 435 |
| | | | | [Homo sapiens] | | 23% | 43 | 222 |
| HSLJE54 | 926924 | 566 | HMMER | PFAM: Pyridoxal- | PF00282 | 35.8 | 342 | 536 |
| | | | 2.1.1 | dependent decarboxylase | | | | |
| | | | | conserved domain | | | | |
| | | | blastx.2 | CYSTEINE SULFINIC | sp\|Q9UNJ5\|Q9UNJ5 | 98% | 198 | 548 |
| | | | | ACID | | 92% | 542 | 739 |
| | | | | DECARBOXYLASE- | | 85% | 721 | 885 |
| | | | | RELATED PROTEIN 4. | | 100% | 885 | 908 |
| HTGED07 | 927411 | 287 | HMMER | PFAM: Sec1 family | PF00995 | 128.9 | 34 | 297 |
| | | | 2.1.1 | | | | | |
| | | | blastx.2 | VESICLE TRANSPORT- | sp\|Q9Y6A8\|Q9Y6A8 | 89% | 25 | 309 |
| | | | | RELATED PROTEIN. | | | | |
| HOFNH30 | 928365 | 288 | HMMER | PFAM: 7 transmembrane | PF00001 | 24.58 | 9 | 248 |
| | | | 1.8 | receptor (rhodopsin | | | | |
| | | | | family) | | | | |
| | | | blastx.2 | CALCIUM- | sp\|Q9UBY5\|Q9UBY5 | 75% | 18 | 263 |
| | | | | MOBILIZING | | 54% | 265 | 375 |
| | | | | LYSOPHOSPHATIDIC | | | | |
| | | | | ACID RECEPTOR 1 | | | | |
| HWNCY05 | 1179767 | 289 | blastx.14 | GOK [Homo sapiens] | gi\|2264346\|gb\|AAC51627.1\| | 65% | 10 | 951 |
| HWNCY05 | 928789 | 567 | HMMER | PFAM: EF hand | PF00036 | 12.55 | 18 | 101 |
| | | | 1.8 | | | | | |
| | | | blastx.2 | GOK. | sp\|Q13586\|Q13586 | 60% | 6 | 1292 |
| HDPDA47 | 929193 | 290 | HMMER | PFAM: Src homology | PF00018 | 12.52 | 691 | 810 |
| | | | 1.8 | domain 3 | | | | |
| | | | blastx.2 | (AL049683) hypothetical | emb\|CAB41255.1\| | 69% | 145 | 1026 |
| | | | | protein [Homo sapiens] | | 53% | 945 | 1022 |
| HWMEV63 | 931154 | 291 | HMMER | PFAM: 7 transmembrane | PF00001 | 53.4 | 2 | 262 |
| | | | 2.1.1 | receptor (rhodopsin | | | | |
| | | | | family) | | | | |
| | | | blastx.2 | 7 transmembrane G- | sp\|AAG09275\|AAG09275 | 75% | 2 | 391 |
| | | | | protein coupled receptor. | | | | |
| HCFAT25 | 1052857 | 292 | blastx.14 | (AF096300) HPK/GCK- | gi\|4322936\|gb\|AAD16137.1\| | 72% | 2 | 412 |
| | | | | like kinase HGK [Homo | | | | |
| | | | | sapiens] | | | | |
| HCFAT25 | 932068 | 568 | HMMER | PFAM: Eukaryotic protein | PF00069 | 26.6 | 136 | 231 |
| | | | 2.1.1 | kinase domain | | | | |
| | | | blastx.14 | (AF096300) HPK/GCK- | gi\|4322936\|gb\|AAD16137.1\| | 63% | 91 | 456 |
| | | | | like kinase HGK [Homo | | 72% | 60 | 158 |
| | | | | sapiens] | | 25% | 232 | 312 |
| HHEQV39 | 1165420 | 293 | blastx.14 | (AF037261) SH3- | gi\|3004948\|gb\|AAC09244.1\| | 50% | 517 | 606 |
| | | | | containing adaptor | | 41% | 625 | 696 |
| | | | | molecule-1 [Homo | | 40% | 396 | 470 |
| | | | | sapiens] | | 36% | 141 | 215 |
| HHEQV39 | 932851 | 569 | HMMER | PFAM: Src homology | PF00018 | 30.41 | 526 | 708 |
| | | | 1.8 | domain 3 | | | | |
| HHFJH79 | 933308 | 570 | HMMER | PFAM: von Willebrand | PF00092 | 12.76 | 62 | 232 |
| | | | 1.8 | factor type A domain | | | | |
| | | | blastx.2 | R31181_2, PARTIAL | sp\|O95783\|O95783 | 99% | 14 | 316 |
| | | | | PROTEIN | | | | |
| | | | | (FRAGMENT). | | | | |
| HUCOW17 | 1155190 | 295 | blastx.2 | RHOGAP PROTEIN. | sp\|Q98935\|Q98935 | 61% | 4 | 441 |
| | | | | | | 62% | 787 | 987 |
| HUCOW17 | 933357 | 571 | HMMER | PFAM: Src homology | PF00018 | 20.28 | 647 | 739 |
| | | | 1.8 | domain 3 | | | | |
| | | | blastx.2 | Graf protein [Homo | emb\|CAA71414.2\| | 67% | 1 | 261 |
| | | | | sapiens] | | 50% | 608 | 751 |
| | | | | | | 83% | 756 | 809 |
| | | | | | | 40% | 187 | 246 |
| HFKIT06 | 934019 | 572 | HMMER | PFAM: Eukaryotic protein | PF00069 | 34.65 | 160 | 270 |
| | | | 1.8 | kinase domain | | | | |
| | | | blastx.14 | p58 galactosyltransferase- | pir\|A38282\|A38282 | 51% | 178 | 270 |
| | | | | associated protein kinase - | | 40% | 74 | 118 |
| | | | | human | | | | |
| HDTBY88 | 1104159 | 297 | blastx.14 | (AF130372) serine- | gi\|7108631\|gb\|AAF36509.1\| | 87% | 186 | 491 |
| | | | | threonine protein kinase 1 | AF130372_1 | 98% | 3 | 170 |
| | | | | | | 100% | 497 | 535 |
| HDTBY88 | 934472 | 573 | HMMER | PFAM: Eukaryotic protein | PF00069 | 93.6 | 3 | 302 |
| | | | 2.1.1 | kinase domain | | | | |
| | | | blastx.14 | p56 KKIAMRE protein | gi\|1517820\|gb\|AAC50918.1\| | 82% | 3 | 170 |
| | | | | kinase [Homo sapiens] | | 35% | 192 | 458 |
| | | | | | | 100% | 492 | 509 |
| HWLHS82 | 1082268 | 298 | blastx.2 | (AC005581) R31237_1, | gb\|AAC33487.1\| | 93% | 162 | 902 |
| | | | | partial CDS [Homo | | 88% | 1049 | 1237 |
| | | | | sapiens] | | 100% | 96 | 170 |
| HWLHS82 | 934505 | 574 | HMMER | PFAM: Eukaryotic protein | PF00069 | 147.2 | 2 | 319 |
| | | | 2.1.1 | kinase domain | | | | |
| | | | blastx.2 | (AC005581) R31237_1, | gb\|AAC33487.1\| | 90% | 68 | 364 |
| | | | | partial CDS [Homo | | 100% | 2 | 76 |
| | | | | sapiens] | | 40% | 306 | 422 |
| HDPNC96 | 1081629 | 299 | blastx.14 | HUMAN NDR | gi\|2304746\|emb\|CAA03387.1\| | 92% | 3 | 734 |
| | | | | [unidentified] | | | | |
| HDPNC96 | 934520 | 575 | HMMER | PFAM: Eukaryotic protein | PF00069 | 206.63 | 3 | 734 |
| | | | 1.8 | kinase domain | | | | |
| | | | blastx.14 | HUMAN NDR | gi\|2304746\|emb\|CAA03387.1\| | 92% | 3 | 734 |
| | | | | [unidentified] | | | | |
| HCE5I78 | 1197899 | 300 | blastx.14 | rabphilin-3A - bovine | pir\|A48097\|A48097 | 95% | 191 | 1126 |
| | | | | | | 68% | 11 | 97 |
| HCE5I78 | 934531 | 576 | HMMER | PFAM: C2 domain | PF00168 | 49.14 | 213 | 413 |
| | | | 1.8 | | | | | |
| | | | blastx.2 | rabphilin-3A - bovine | pir\|A48097\|A48097 | 83% | 135 | 404 |
| | | | | | | 61% | 3 | 41 |
| HISDS62 | 1159625 | 301 | blastx.14 | (AJ250425) Collybistin I | gi\|6706318\|emb\|CAB65966.1\| | 90% | 185 | 892 |
| | | | | [Rattus norvegicus] | | | | |
| HISDS62 | 935932 | 577 | HMMER | PFAM: RhoGEF domain | PF00621 | 51.3 | 229 | 486 |
| | | | 2.1.1 | | | | | |
| | | | blastx.2 | (AJ250425) Collybistin I | emb\|CAB65966.1\| | 96% | 1 | 483 |
| | | | | [Rattus norvegicus] | | | | |
| HDQDV69 | 937850 | 578 | HMMER | PFAM: Eukaryotic protein | PF00069 | 212.5 | 68 | 598 |
| | | | 2.1.1 | kinase domain | | | | |
| | | | blastx.2 | (AF169035) protein | gb\|AAF12758.1\|AF169035_1 | 98% | 68 | 829 |
| | | | | kinase [Homo sapiens] | | | | |
| HEMBT61 | 939957 | 303 | HMMER | PFAM: Eukaryotic protein | PF00069 | 76.6 | 16 | 285 |
| | | | 2.1.1 | kinase domain | | | | |
| | | | blastx.2 | (AD000092) hypothetical | gb\|AAB51171.1\| | 71% | 13 | 441 |
| | | | | human serine-threonine | | | | |
| | | | | protein kinase R31240_1 | | | | |
| | | | | [Homo sapiens] | | | | |
| HRODZ70 | 1088554 | 304 | blastx.2 | kinase like protein | emb\|CAB10257.1\| | 39% | 254 | 544 |
| | | | | [Arabidopsis thaliana] | | 50% | 524 | 601 |
| HRODZ70 | 942673 | 580 | HMMER | PFAM: Eukaryotic protein | PF00069 | 78.2 | 33 | 248 |
| | | | 2.1.1 | kinase domain | | | | |
| | | | blastx.2 | kinase like protein | emb\|CAB10257.1\| | 39% | 33 | 323 |
| | | | | [Arabidopsis thaliana] | | 50% | 303 | 380 |
| HHERQ79 | 944057 | 581 | HMMER | PFAM: Eukaryotic protein | PF00069 | 83.4 | 133 | 474 |
| | | | 1.8 | kinase domain | | | | |
| | | | blastx.2 | (AB016589) inducible | dbj\|BAA85154.1\| | 90% | 109 | 471 |
| | | | | IKappaB kinase [Mus | | | | |
| | | | | musculus] | | | | |
| HCECM90 | 945088 | 582 | HMMER | PFAM: Src homology | PF00018 | 53.06 | 392 | 568 |
| | | | 1.8 | domain 3 | | | | |
| HWHGW72 | 945692 | 583 | HMMER | PFAM: ATP P2X receptor | PF00864 | 438.5 | 247 | 855 |
| | | | 2.1.1 | | | | | |
| | | | blastx.2 | (AF190822) P2X2A | gb\|AAF19170.1\|AF190822_1 | 91% | 190 | 939 |
| | | | | receptor [Homo sapiens] | | | | |
| HPCRV84 | 1219890 | 308 | blastx.14 | MATERNAL | sp\|Q61846\|Q61846 | 94% | 138 | 839 |
| | | | | EMBRYONIC LEUCINE | | | | |
| | | | | ZIPPER KINASE | | | | |
| | | | | (SERINE/THREONINE 1 | | | | |
| HPCRV84 | 945856 | 585 | HMMER | PFAM: Eukaryotic protein | PF00069 | 75.57 | 157 | 384 |
| | | | 1.8 | kinase domain | | | | |
| | | | blastx.2 | similar to protein kinase | dbj\|BAA11492.1\| | 78% | 127 | 483 |
| | | | | of X. laevis, has putative 1 | | | | |
| HNSAA28 | 946988 | 309 | HMMER | PFAM: SH3 domain | PF00018 | 149 | 757 | 915 |
| | | | 2.1.1 | | | | | |
| | | | blastx.2 | (AF146277) adapter | gb\|AAD34595.1\|AF146277_1 | 82% | 4 | 1554 |
| | | | | protein CMS [Homo | | | | |
| | | | | sapiens] | | | | |
| HNSAA28 | 972348 | 586 | blastx.14 | (AF146277) adapter | gi\|4960047\|gb\|AAD34595.1\| | 88% | 21 | 449 |
| | | | | protein CMS [Homo | AF146277_1 | | | |
| | | | | sapiens] | | | | |
| HLWAR77 | 947484 | 310 | HMMER | PFAM: 7 transmembrane | PF00001 | 214.2 | 1287 | 553 |
| | | | 1.8 | receptor (rhodopsin | | | | |
| | | | | family) | | | | |
| | | | blastx.2 | G-protein coupled | sp\|AAF87078\|AAF87078 | 100% | 1287 | 292 |
| | | | | receptor HLWAR77. | | | | |
| HTTJW49 | 1127477 | 311 | blastx.14 | (AF118838) citrin; adult- | gi\|5052319\|gb\|AAD38501.1\| | 94% | 516 | 1244 |
| | | | | onset type II citrullinemia | AF118838_1 | 97% | 101 | 532 |
| | | | | protein [Homo sapiens] | | 90% | 1232 | 1381 |
| | | | | | | 100% | 1408 | 1500 |
| | | | | | | 37% | 1244 | 1378 |
| | | | | | | 40% | 1411 | 1476 |
| | | | | | | 40% | 1200 | 1244 |
| | | | | | | 60% | 1143 | 1172 |
| | | | | | | 33% | 383 | 481 |
| | | | | | | 33% | 597 | 695 |
| HTTJW49 | 948107 | 587 | HMMER | PFAM: EF hand | PF00036 | 11.98 | 283 | 348 |
| | | | 1.8 | | | | | |
| | | | blastx.2 | CITRIN. | sp\|Q9UNI7\|Q9UNI7 | 84% | 94 | 627 |
| HWAFS18 | 1155193 | 312 | blastx.14 | (AF156884) RIP-like | gi\|5059425\|gb\|AAD39005.1\| | 89% | 165 | 1718 |
| | | | | kinase [Homo sapiens] | AF156884_1 | | | |
| HWAFS18 | 948434 | 588 | HMMER | PFAM: Eukaryotic protein | PF00069 | 115.98 | 225 | 632 |
| | | | 1.8 | kinase domain | | | | |
| | | | blastx.14 | (AF156884) RIP-like | gi\|5059425\|gb\|AAD39005.1\| | 91% | 165 | 632 |
| | | | | kinase [Homo sapiens] | AF156884_1 | 66% | 702 | 773 |
| | | | | | | 100% | 632 | 661 |
| HFCBA44 | 1082762 | 313 | blastx.14 | (AB010633) | gi\|2810987\|dbj\|BAA24523.1\| | 61% | 184 | 639 |
| | | | | carboxylesterase precursor | | | | |
| | | | | [Macaca fascicularis] | | | | |
| HFCBA44 | 948533 | 589 | HMMER | PFAM: Carboxylesterases | PF00135 | 34.24 | 315 | 485 |
| | | | 1.8 | | | | | |
| | | | blastx.2 | thiolesterase B (EC 3.—.—.—) | pir\|A47162\|A47162 | 56% | 2 | 208 |
| | | | | precursor - mallard | | 60% | 423 | 482 |
| | | | | | | 48% | 184 | 264 |
| HVADT77 | 1180374 | 314 | blastx.14 | alpha-3 collagen type VI | gi\|211622\|gb\|AAA03201.1\| | 55% | 12 | 119 |
| | | | | [Gallus gallus] | | | | |
| HVADT77 | 948886 | 590 | HMMER | PFAM: Kunitz/Bovine | PF00014 | 74.41 | 169 | 321 |
| | | | 1.8 | pancreatic trypsin | | | | |
| | | | | inhibitor domain | | | | |
| | | | blastx.2 | alpha-3 collagen type VI | gb\|AAA03201.1\| | 43% | 130 | 330 |
| | | | | [Gallus gallus] | | | | |
| HUFCN91 | 1189013 | 315 | blastx.14 | copine I [Homo sapiens] | gi\|1791257\|gb\|AAC15920.1\| | 54% | 103 | 540 |
| | | | | | | 48% | 561 | 782 |
| | | | | | | 71% | 874 | 936 |
| | | | | | | 75% | 540 | 587 |
| | | | | | | 64% | 783 | 833 |
| HUFCN91 | 949137 | 591 | HMMER | PFAM: von Willebrand | PF00092 | 9.83 | 529 | 729 |
| | | | 1.8 | factor type A domain | | | | |
| | | | blastx.14 | copine I [Homo sapiens] | gi\|1791257\|gb\|AAC15920.1\| | 56% | 103 | 588 |
| | | | | | | 48% | 971 | 1333 |
| | | | | | | 48% | 562 | 783 |
| | | | | | | 57% | 1332 | 1430 |
| | | | | | | 45% | 899 | 1009 |
| | | | | | | 64% | 784 | 834 |
| HAGBX32 | 951351 | 316 | HMMER | PFAM: PMP- | PF00822 | 182.3 | 3 | 476 |
| | | | 2.1.1 | 22/EMP/MP20/Claudin | | | | |
| | | | | family | | | | |
| | | | blastx.2 | VOLTAGE- | sp\|O60359\|CCG3_HUMAN | 89% | 12 | 551 |
| | | | | DEPENDENT | | | | |
| | | | | CALCIUM CHANNEL | | | | |
| | | | | GAMMA-3 SUBUNIT 1 | | | | |
| HWMIB81 | 955336 | 593 | HMMER | PFAM: Eukaryotic protein | PF00069 | 122.85 | 1458 | 934 |
| | | | 1.8 | kinase domain | | | | |
| | | | blastx.2 | (AK000528) unnamed | dbj\|BAA91232.1\| | 100% | 3 | 572 |
| | | | | protein product [Homo | | | | |
| | | | | sapiens] | | | | |
| HCEMU86 | 1156430 | 318 | blastx.14 | p87 = transporter-like | gi\|259174\|gb\|AAB24028.1\| | 91% | 10 | 795 |
| | | | | protein [cattle, Peptide, | | | | |
| | | | | 742 aa] [Bos taurus] | | | | |
| HCEMU86 | 956864 | 594 | HMMER | PFAM: Sugar (and other) | PF00083 | 24.49 | 2124 | 1738 |
| | | | 1.8 | transporters | | | | |
| | | | blastx.2 | p87 = transporter-like | gb\|AAB24028.1\| | 99% | 3 | 788 |
| | | | | protein [cattle, Peptide, | | | | |
| | | | | 742 aa] [Bos taurus] | | | | |
| HRDAF83 | 1153911 | 319 | blastx.14 | (AF137378) integrin alpha | gi\|5915662\|gb\|AAD51919.2\| | 93% | 42 | 338 |
| | | | | 11 subunit precursor | AF137378_1 | | | |
| | | | | [Homo sapiens] | | | | |
| HRDAF83 | 957143 | 595 | HMMER | PFAM: von Willebrand | PF00092 | 89.99 | 72 | 332 |
| | | | 1.8 | factor type A domain | | | | |
| | | | blastx.2 | (AF137378) integrin alpha | gb\|AAD51919.2\|AF137378_1 | 92% | 36 | 332 |
| | | | | 11 subunit precursor | | | | |
| | | | | [Homo sapiens] | | | | |
| HUVGZ88 | 1204719 | 320 | blastx.14 | PRO1038. | sp\|AAF71042\|AAF71042 | 50% | 527 | 988 |
| | | | | | | 44% | 974 | 1183 |
| | | | | | | 50% | 444 | 593 |
| | | | | | | 30% | 732 | 851 |
| | | | | | | 75% | 713 | 736 |
| HUVGZ88 | 959020 | 597 | HMMER | PFAM: Eukaryotic protein | PF00069 | 31.12 | 182 | 439 |
| | | | 1.8 | kinase domain | | | | |
| HSCKS55 | 961074 | 598 | HMMER | PFAM: C2 domain | PF00168 | 4.41 | 931 | 993 |
| | | | 1.8 | | | | | |
| HOEET48 | 963290 | 322 | HMMER | PFAM: EF hand | PF00036 | 26 | 656 | 727 |
| | | | 2.1.1 | | | | | |
| | | | blastx.2 | Reticulocabin precursor. | sp\|AAG09692\|AAG09692 | 96% | 47 | 1030 |
| HBODE51 | 964235 | 599 | HMMER | PFAM: Mitochondrial | PF00153 | 235.26 | 995 | 1834 |
| | | | 1.8 | carrier proteins | | | | |
| | | | blastx.14 | aralar1 [Homo sapiens] | gi\|3559910\|emb\|CAA74834.1\| | 93% | 20 | 2053 |
| HHFCK09 | 965304 | 324 | HMMER | PFAM: TBC domain | PF00566 | 179.1 | 2305 | 1655 |
| | | | 2.1.1 | | | | | |
| | | | blastx.2 | (AL022238) dJ1042K10.2 | emb\|CAA18266.1\| | 97% | 2635 | 1268 |
| | | | | (supported by | | 98% | 1276 | 389 |
| | | | | GENSCAN, FGENES and | | | | |
| | | | | GENEWISE) [Homo | | | | |
| | | | | sapiens] | | | | |
| HCOOZ11 | 965306 | 600 | HMMER | PFAM: Src homology | PF00018 | 5.22 | 179 | 214 |
| | | | 1.8 | domain 3 | | | | |
| | | | blastx.2 | (AL022238) dJ1042K10.2 | emb\|CAA18266.1\| | 100% | 182 | 589 |
| | | | | (supported by | | | | |
| | | | | GENSCAN, FGENES and | | | | |
| | | | | GENEWISE) [Homo | | | | |
| | | | | sapiens] | | | | |
| HDPPO35 | 1119032 | 326 | blastx.14 | (AL049683) hypothetical | gi\|4678753\|emb\|CAB41255.1\| | 63% | 561 | 758 |
| | | | | protein [Homo sapiens] | | 65% | 816 | 980 |
| | | | | | | 71% | 84 | 146 |
| | | | | | | 65% | 300 | 359 |
| | | | | | | 45% | 1080 | 1139 |
| | | | | | | 25% | 117 | 245 |
| HDPPO35 | 966248 | 601 | HMMER | PFAM: Src homology | PF00018 | 14.07 | 600 | 749 |
| | | | 1.8 | domain 3 | | | | |
| | | | blastx.2 | (AL049683) hypothetical | emb\|CAB41255.1\| | 39% | 84 | 1148 |
| | | | | protein [Homo sapiens] | | | | |
| HLWDZ53 | 968602 | 602 | HMMER | PFAM: Actin | PF00022 | 291.1 | 77 | 1111 |
| | | | 2.1.1 | | | | | |
| | | | blastx.2 | Actin-related protein 3- | sp\|AAC98904\|AAC98904 | 99% | 95 | 1126 |
| | | | | beta. | | 100% | 54 | 98 |
| HEOPL36 | 968826 | 603 | HMMER | PFAM: Src homology | PF00018 | 79.81 | 316 | 483 |
| | | | 1.8 | domain 3 | | | | |
| | | | blastx.2 | (AL049758) dJ437M21.3 | emb\|CAB51395.1\| | 99% | 178 | 486 |
| | | | | (protein kinase C and | | | | |
| | | | | casein kinase substrate in | | | | |
| | | | | neurons 2) [Homo | | | | |
| | | | | sapiens] | | | | |
| HMCFS02 | 1152252 | 329 | blastx.14 | (AK000482) unnamed | gi\|7020600\|dbj\|BAA91194.1\| | 59% | 72 | 725 |
| | | | | protein product [Homo | | 40% | 716 | 781 |
| | | | | sapiens] | | | | |
| HMCFS02 | 969326 | 604 | HMMER | PFAM: C2 domain | PF00168 | 8.05 | 347 | 457 |
| | | | 1.8 | | | | | |
| | | | blastx.2 | CDNA FLJ20475 FIS, | sp\|BAA91194\|BAA91194 | 59% | 116 | 496 |
| | | | | CLONE KAT07206. | | | | |
| HDPSR15 | 969666 | 605 | HMMER | PFAM: Eukaryotic protein | PF00069 | 87.19 | 351 | 626 |
| | | | 1.8 | kinase domain | | | | |
| | | | blastx.2 | (AB026289) protein | dbj\|BAA85045.1\| | 95% | 631 | 1158 |
| | | | | kinase SID6-1512 [Homo | | 89% | 240 | 692 |
| | | | | sapiens] | | | | |
| HNTAV78 | 971315 | 606 | HMMER | PFAM: 7 transmembrane | PF00001 | 23.92 | 3 | 143 |
| | | | 1.8 | receptor (rhodopsin | | | | |
| | | | | family) | | | | |
| | | | blastx.2 | Cysteinyl leukotriene | sp\|BAB03601\|BAB03601 | 100% | 3 | 266 |
| | | | | CysLT2 receptor. | | | | |
| HFKDR14 | 1145842 | 332 | blastx.14 | (AF128625) CDC42- | gi\|5006445\|gb\|AAD37506.1\| | 98% | 90 | 1277 |
| | | | | binding protein kinase | AF128625_1 | 100% | 1279 | 1320 |
| | | | | beta [Homo sapiens] | | | | |
| HFKDR14 | 974255 | 607 | HMMER | PFAM: Eukaryotic protein | PF00069 | 244.21 | 297 | 1097 |
| | | | 1.8 | kinase domain | | | | |
| | | | blastx.2 | (AF128625) CDC42- | gb\|AAD37506.1\|AF128625_1 | 98% | 72 | 1733 |
| | | | | binding protein kinase | | 22% | 1572 | 1706 |
| | | | | beta [Homo sapiens] | | | | |
| HDPBI30 | 974711 | 333 | HMMER | PFAM: 7 transmembrane | PF00001 | 171.31 | 386 | 1096 |
| | | | 1.8 | receptor (rhodopsin | | | | |
| | | | | family) | | | | |
| | | | blastx.2 | G PROTEIN-COUPLED | sp\|Q9UNW8\|Q9UNW8 | 93% | 206 | 1312 |
| | | | | RECEPTOR. | | | | |
| HODFF88 | 1094875 | 334 | blastx.2 | mixed-lineage protein | pir\|S32467\|JU0229 | 73% | 89 | 493 |
| | | | | kinase 1 - human | | 81% | 763 | 969 |
| HODFF88 | 974911 | 608 | HMMER | PFAM: Eukaryotic protein | PF00069 | 101.43 | 98 | 370 |
| | | | 1.8 | kinase domain | | | | |
| | | | blastx.14 | mixed-lineage protein | pir\|S32467\|JU0229 | 74% | 131 | 493 |
| | | | | kinase 1 - human | | 81% | 763 | 921 |
| | | | | | | 30% | 751 | 915 |

[0049] Table 2 further characterizes certain encoded polypeptides of the invention, by providing the results of comparisons to protein and protein family databases. The first column provides a unique clone identifier, “Clone ID NO:”, corresponding to a cDNA clone disclosed in Table 1A. The second column provides the unique contig identifier, “Contig ID:” which allows correlation with the information in Table 1A. The third column provides the sequence identifier, “SEQ ID NO:”, for the contig polynucleotide sequences. The fourth column provides the analysis method by which the homology/identity disclosed in the Table was determined. The fifth column provides a description of the PFAM/NR hit identified by each analysis. Column six provides the accession number of the PFAM/NR hit disclosed in the fifth column. Column seven, score/percent identity, provides a quality score or the percent identity, of the hit disclosed in column five. Comparisons were made between polypeptides encoded by polynucleotides of the invention and a non-redundant protein database (herein referred to as “NR”), or a database of protein families (herein referred to as “PFAM”), as described below.

[0050] The NR database, which comprises the NBRF PIR database, the NCBI GenPept database, and the SIB SwissProt and TrEMBL databases, was made non-redundant using the computer program nrdb2 (Warren Gish, Washington University in Saint Louis). Each of the polynucleotides shown in Table 1A, column 3 (e.g., SEQ ID NO:X or the ‘Query’ sequence) was used to search against the NR database. The computer program BLASTX was used to compare a 6-frame translation of the Query sequence to the NR database (for information about the BLASTX algorithm please see Altshul et al., J. Mol. Biol. 215:403-410 (1990); and Gish and States, Nat. Genet. 3:266-272 (1993). A description of the sequence that is most similar to the Query sequence (the highest scoring ‘Subject’) is shown in column five of Table 2 and the database accession number for that sequence is provided in column six. The highest scoring ‘Subject’ is reported in Table 2 if (a) the estimated probability that the match occurred by chance alone is less than 1.0e-07, and (b) the match was not to a known repetitive element. BLASTX returns alignments of short polypeptide segments of the Query and Subject sequences which share a high degree of similarity; these segments are known as High-Scoring Segment Pairs or HSPs. Table 2 reports the degree of similarity between the Query and the Subject for each HSP as a percent identity in Column 7. The percent identity is determined by dividing the number of exact matches between the two aligned sequences in the HSP, dividing by the number of Query amino acids in the HSP and multiplying by 100. The polynucleotides of SEQ ID NO:X which encode the polypeptide sequence that generates an HSP are delineated by columns 8 and 9 of Table 2.

[0051] The PFAM database, PFAM version 2.1, (Sonnhammer et al., Nucl. Acids Res., 26:320-322, 1998)) consists of a series of multiple sequence alignments; one alignment for each protein family. Each multiple sequence alignment is converted into a probability model called a Hidden Markov Model, or HMM, that represents the position-specific variation among the sequences that make up the multiple sequence alignment (see, e.g., Durbin et al., Biological sequence analysis. probabilistic models of proteins and nucleic acids, Cambridge University Press, 1998 for the theory of HMMs). The program HMMER version 1.8 (Sean Eddy, Washington University in Saint Louis) was used to compare the predicted protein sequence for each Query sequence (SEQ ID NO:Y in Table 1A) to each of the HMMs derived from PFAM version 2.1. A HMM derived from PFAM version 2.1 was said to be a significant match to a polypeptide of the invention if the score returned by HMMER 1.8 was greater than 0.8 times the HMMER 1.8 score obtained with the most distantly related known member of that protein family. The description of the PFAM family which shares a significant match with a polypeptide of the invention is listed in column 5 of Table 2, and the database accession number of the PFAM hit is provided in column 6. Column 7 provides the score returned by HMMER version 1.8 for the alignment. Columns 8 and 9 delineate the polynucleotides of SEQ ID NO:X which encode the polypeptide sequence which show a significant match to a PFAM protein family.

[0052] As mentioned, columns 8 and 9 in Table 2, “NT From” and “NT To”, delineate the polynucleotides of “SEQ ID NO:X” that encode a polypeptide having a significant match to the PFAM/NR database as disclosed in the fifth column. In one embodiment, the invention provides a protein comprising, or alternatively consisting of, a polypeptide encoded by the polynucleotides of SEQ ID NO:X delineated in columns 8 and 9 of Table 2. Also provided are polynucleotides encoding such proteins, and the complementary strand thereto.

[0053] The nucleotide sequence SEQ ID NO:X and the translated SEQ ID NO:Y are sufficiently accurate and otherwise suitable for a variety of uses well known in the art and described further below. For instance, the nucleotide sequences of SEQ ID NO:X are useful for designing nucleic acid hybridization probes that will detect nucleic acid sequences contained in SEQ ID NO:X or the cDNA contained in Clone ID NO:Z. These probes will also hybridize to nucleic acid molecules in biological samples, thereby enabling immediate applications in chromosome mapping, linkage analysis, tissue identification and/or typing, and a variety of forensic and diagnostic methods of the invention. Similarly, polypeptides identified from SEQ ID NO:Y may be used to generate antibodies which bind specifically to these polypeptides, or fragments thereof, and/or to the polypeptides encoded by the cDNA clones identified in, for example, Table 1A.

[0054] Nevertheless, DNA sequences generated by sequencing reactions can contain sequencing errors. The errors exist as misidentified nucleotides, or as insertions or deletions of nucleotides in the generated DNA sequence. The erroneously inserted or deleted nucleotides cause frame shifts in the reading frames of the predicted amino acid sequence. In these cases, the predicted amino acid sequence diverges from the actual amino acid sequence, even though the generated DNA sequence may be greater than 99.9% identical to the actual DNA sequence (for example, one base insertion or deletion in an open reading frame of over 1000 bases).

[0055] Accordingly, for those applications requiring precision in the nucleotide sequence or the amino acid sequence, the present invention provides not only the generated nucleotide sequence identified as SEQ ID NO:X, and a predicted translated amino acid sequence identified as SEQ ID NO:Y, but also a sample of plasmid DNA containing cDNA Clone ID NO:Z (deposited with the ATCC on Oct. 5, 2000, and receiving ATCC designation numbers PTA 2574 and PTA 2575; deposited with the ATCC on Jan. 5, 2001, and having depositor reference numbers TS-1, TS-2, AC-1, and AC-2; and/or as set forth, for example, in Table 1A, 6 and 7). The nucleotide sequence of each deposited clone can readily be determined by sequencing the deposited clone in accordance with known methods. Further, techniques known in the art can be used to verify the nucleotide sequences of SEQ ID NO:X.

[0056] The predicted amino acid sequence can then be verified from such deposits. Moreover, the amino acid sequence of the protein encoded by a particular clone can also be directly determined by peptide sequencing or by expressing the protein in a suitable host cell containing the deposited human cDNA, collecting the protein, and determining its sequence.

[0057] RACE Protocol For Recovery of Full-Length Genes

[0058] Partial cDNA clones can be made full-length by utilizing the rapid amplification of cDNA ends (RACE) procedure described in Frohman, M. A., et al., Proc. Nat'l. Acad. Sci. USA, 85:8998-9002 (1988). A cDNA clone missing either the 5′ or 3′ end can be reconstructed to include the absent base pairs extending to the translational start or stop codon, respectively. In some cases, cDNAs are missing the start codon of translation, therefor. The following briefly describes a modification of this original 5′ RACE procedure. Poly A+ or total RNA is reverse transcribed with Superscript II (Gibco/BRL) and an antisense or complementary primer specific to the cDNA sequence. The primer is removed from the reaction with a Microcon Concentrator (Amicon). The first-strand cDNA is then tailed with dATP and terminal deoxynucleotide transferase (Gibco/BRL). Thus, an anchor sequence is produced which is needed for PCR amplification. The second strand is synthesized from the dA-tail in PCR buffer, Taq DNA polymerase (Perkin-Elmer Cetus), an oligo-dT primer containing three adjacent restriction sites (XhoI, SalI and ClaI) at the 5′ end and a primer containing just these restriction sites. This double-stranded cDNA is PCR amplified for 40 cycles with the same primers as well as a nested cDNA-specific antisense primer. The PCR products are size-separated on an ethidium bromide-agarose gel and the region of gel containing cDNA products the predicted size of missing protein-coding DNA is removed. cDNA is purified from the agarose with the Magic PCR Prep kit (Promega), restriction digested with XhoI or SalI, and ligated to a plasmid such as pBluescript SKII (Stratagene) at XhoI and EcoRV sites. This DNA is transformed into bacteria and the plasmid clones sequenced to identify the correct protein-coding inserts. Correct 5′ ends are confirmed by comparing this sequence with the putatively identified homologue and overlap with the partial cDNA clone. Similar methods known in the art and/or commercial kits are used to amplify and recover 3′ ends.

[0059] Several quality-controlled kits are commercially available for purchase. Similar reagents and methods to those above are supplied in kit form from Gibco/BRL for both 5′ and 3′ RACE for recovery of full length genes. A second kit is available from Clontech which is a modification of a related technique, SLIC (single-stranded ligation to single-stranded cDNA), developed by Dumas et al., Nucleic Acids Res., 19:5227-32 (1991). The major differences in procedure are that the RNA is alkaline hydrolyzed after reverse transcription and RNA ligase is used to join a restriction site-containing anchor primer to the first-strand cDNA. This obviates the necessity for the dA-tailing reaction which results in a polyT stretch that is difficult to sequence past.

[0060] An alternative to generating 5′ or 3′ cDNA from RNA is to use cDNA library double-stranded DNA. An asymmetric PCR-amplified antisense cDNA strand is synthesized with an antisense cDNA-specific primer and a plasmid-anchored primer. These primers are removed and a symmetric PCR reaction is performed with a nested cDNA-specific antisense primer and the plasmid-anchored primer.

[0061] RNA Ligase Protocol for Generating The 5′ or 3′ End Sequences to Obtain Full Length Genes

[0062] Once a gene of interest is identified, several methods are available for the identification of the 5′ or 3′ portions of the gene which may not be present in the original cDNA plasmid. These methods include, but are not limited to, filter probing, clone enrichment using specific probes and protocols similar and identical to 5′ and 3′ RACE. While the full length gene may be present in the library and can be identified by probing, a useful method for generating the 5′ or 3′ end is to use the existing sequence information from the original cDNA to generate the missing information. A method similar to 5′ RACE is available for generating the missing 5′ end of a desired full-length gene. (This method was published by Fromont-Racine et al., Nucleic Acids Res., 21(7):1683-1684 (1993)). Briefly, a specific RNA oligonucleotide is ligated to the 5′ ends of a population of RNA presumably containing full-length gene RNA transcript and a primer set containing a primer specific to the ligated RNA oligonucleotide and a primer specific to a known sequence of the gene of interest, is used to PCR amplify the 5′ portion of the desired full length gene which may then be sequenced and used to generate the full length gene. This method starts with total RNA isolated from the desired source, poly A RNA may be used but is not a prerequisite for this procedure. The RNA preparation may then be treated with phosphatase if necessary to eliminate 5′ phosphate groups on degraded or damaged RNA which may interfere with the later RNA ligase step. The phosphatase if used is then inactivated and the RNA is treated with tobacco acid pyrophosphatase in order to remove the cap structure present at the 5′ ends of messenger RNAs. This reaction leaves a 5′ phosphate group at the 5′ end of the cap cleaved RNA which can then be ligated to an RNA oligonucleotide using T4 RNA ligase. This modified RNA preparation can then be used as a template for first strand cDNA synthesis using a gene specific oligonucleotide. The first strand synthesis—reaction can then be used as a template for PCR amplification of the desired 5′ end using a primer specific to the ligated RNA oligonucleotide and a primer specific to the known sequence of the gene of interest. The resultant product is then sequenced and analyzed to confirm that the 5′ end sequence belongs to the relevant gene.

[0063] The present invention also relates to vectors or plasmids which include such DNA sequences, as well as the use of the DNA sequences. The material deposited with the ATCC (deposited with the ATCC on Oct. 5, 2000, and receiving ATCC designation numbers PTA 2574 and PTA 2575; deposited with the ATCC on Jan. 5, 2001, and receiving ATCC designation numbers TS-1, TS-2, AC-1, and AC-2; and/or as set forth, for example, in Table 1A, Table 6, or Table 7) is a mixture of cDNA clones derived from a variety of human tissue and cloned in either a plasmid vector or a phage vector, as described, for example, in Table 7. These deposits are referred to as “the deposits” herein. The tissues from which some of the clones were derived are listed in Table 7, and the vector in which the corresponding cDNA is contained is also indicated in Table 7. The deposited material includes cDNA clones corresponding to SEQ ID NO:X described, for example, in Table 1A (Clone ID NO:Z). A clone which is isolatable from the ATCC Deposits by use of a sequence listed as SEQ ID NO:X, may include the entire coding region of a human gene or in other cases such clone may include a substantial portion of the coding region of a human gene. Furthermore, although the sequence listing may in some instances list only a portion of the DNA sequence in a clone included in the ATCC Deposits, it is well within the ability of one skilled in the art to sequence the DNA included in a clone contained in the ATCC Deposits by use of a sequence (or portion thereof) described in, for example Tables 1A or 2 by procedures hereinafter further described, and others apparent to those skilled in the art.

[0064] Also provided in Table 7 is the name of the vector which contains the cDNA clone. Each vector is routinely used in the art. The following additional information is provided for convenience.

[0065] Vectors Lambda Zap (U.S. Pat. Nos. 5,128,256 and 5,286,636), Uni-Zap XR (U.S. Pat. Nos. 5,128,256 and 5,286,636), Zap Express (U.S. Pat. Nos. 5,128,256 and 5,286,636), pBluescript (pBS) (Short, J. M. et al., Nucleic Acids Res. 16:7583-7600 (1988); Alting-Mees, M. A. and Short, J. M., Nucleic Acids Res. 17:9494 (1989)) and pBK (Alting-Mees, M. A. et al., Strategies 5:58-61 (1992)) are commercially available from Stratagene Cloning Systems, Inc., 11011 N. Torrey Pines Road, La Jolla, Calif., 92037. pBS contains an ampicillin resistance gene and pBK contains a neomycin resistance gene. Phagemid pBS may be excised from the Lambda Zap and Uni-Zap XR vectors, and phagemid pBK may be excised from the Zap Express vector. Both phagemids may be transformed into E. coli strain XL-1 Blue, also available from Stratagene.

[0066] Vectors pSport1, pCMVSport 1.0, pCMVSport 2.0 and pCMVSport 3.0, were obtained from Life Technologies, Inc., P. O. Box 6009, Gaithersburg, Md. 20897. All Sport vectors contain an ampicillin resistance gene and may be transformed into E. coli strain DH10B, also available from Life Technologies. See, for instance, Gruber, C. E., et al., Focus 15:59-(1993). Vector lafmid BA (Bento Soares, Columbia University, New York, N.Y.) contains an ampicillin resistance gene and can be transformed into E. coli strain XL-1 Blue. Vector pCR®2.1, which is available from Invitrogen, 1600 Faraday Avenue, Carlsbad, Calif. 92008, contains an ampicillin resistance gene and may be transformed into E. coli strain DH10B, available from Life Technologies. See, for instance, Clark, J. M., Nuc. Acids Res. 16:9677-9686 (1988) and Mead, D. et al., Bio/Technology 9: (1991).

[0067] The present invention also relates to the genes corresponding to SEQ ID NO:X, SEQ ID NO:Y, and/or the deposited clone (Clone ID NO:Z). The corresponding gene can be isolated in accordance with known methods using the sequence information disclosed herein. Such methods include preparing probes or primers from the disclosed sequence and identifying or amplifying the corresponding gene from appropriate sources of genomic material.

[0068] Also provided in the present invention are allelic variants, orthologs, and/or species homologs. Procedures known in the art can be used to obtain full-length genes, allelic variants, splice variants, full-length coding portions, orthologs, and/or species homologs of genes corresponding to SEQ ID NO:X or the complement thereof, polypeptides encoded by genes corresponding to SEQ ID NO:X or the complement thereof, and/or the cDNA contained in Clone ID NO:Z, using information from the sequences disclosed herein or the clones deposited with the ATCC. For example, allelic variants and/or species homologs may be isolated and identified by making suitable probes or primers from the sequences provided herein and screening a suitable nucleic acid source for allelic variants and/or the desired homologue.

[0069] The polypeptides of the invention can be prepared in any suitable manner. Such polypeptides include isolated naturally occurring polypeptides, recombinantly produced polypeptides, synthetically produced polypeptides, or polypeptides produced by a combination of these methods. Means for preparing such polypeptides are well understood in the art.

[0070] The polypeptides may be in the form of the secreted protein, including the mature form, or may be a part of a larger protein, such as a fusion protein (see below). It is often advantageous to include an additional amino acid sequence which contains secretory or leader sequences, pro-sequences, sequences which aid in purification, such as multiple histidine residues, or an additional sequence for stability during recombinant production.

[0071] The polypeptides of the present invention are preferably provided in an isolated form, and preferably are substantially purified. A recombinantly produced version of a polypeptide, including the secreted polypeptide, can be substantially purified using techniques described herein or otherwise known in the art, such as, for example, by the one-step method described in Smith and Johnson, Gene 67:31-40 (1988). Polypeptides of the invention also can be purified from natural, synthetic or recombinant sources using techniques described herein or otherwise known in the art, such as, for example, antibodies of the invention raised against the polypeptides of the present invention in methods which are well known in the art.

[0072] The present invention provides a polynucleotide comprising, or alternatively consisting of, the nucleic acid sequence of SEQ ID NO:X, and/or the cDNA sequence contained in Clone ID NO:Z. The present invention also provides a polypeptide comprising, or alternatively, consisting of, the polypeptide sequence of SEQ ID NO:Y, a polypeptide encoded by SEQ ID NO:X or a complement thereof, a polypeptide encoded by the cDNA contained in Clone ID NO:Z, and/or the polypeptide sequence encoded by a nucleotide sequence in SEQ ID NO:B as defined in column 6 of Table 1B. Polynucleotides encoding a polypeptide comprising, or alternatively consisting of the polypeptide sequence of SEQ ID NO:Y, a polypeptide encoded by SEQ ID NO:X, a polypeptide encoded by the cDNA contained in Clone ID NO:Z, and/or a polypeptide sequence encoded by a nucleotide sequence in SEQ ID NO:B as defined in column 6 of Table 1B are also encompassed by the invention. The present invention further encompasses a polynucleotide comprising, or alternatively consisting of, the complement of the nucleic acid sequence of SEQ ID NO:X, a nucleic acid sequence encoding a polypeptide encoded by the complement of the nucleic acid sequence of SEQ ID NO:X, and/or the cDNA contained in Clone ID NO:Z.

[0073] Moreover, representative examples of polynucleotides of the invention comprise, or alternatively consist of, one, two, three, four, five, six, seven, eight, nine, ten, or more of the sequences delineated in Table 1B column 6, or any combination thereof. Additional, representative examples of polynucleotides of the invention comprise, or alternatively consist of, one, two, three, four, five, six, seven, eight, nine, ten, or more of the complementary strand(s) of the sequences delineated in Table 1B column 6, or any combination thereof. In further embodiments, the above-described polynucleotides of the invention comprise, or alternatively consist of, sequences delineated in Table 1B, column 6, and have a nucleic acid sequence which is different from that of the BAC fragment having the sequence disclosed in SEQ ID NO:B (see Table 1B, column 5). In additional embodiments, the above-described polynucleotides of the invention comprise, or alternatively consist of, sequences delineated in Table 1B, column 6, and have a nucleic acid sequence which is different from that published for the BAC clone identified as BAC ID NO:A (see Table 1B, column 4). In additional embodiments, the above-described polynucleotides of the invention comprise, or alternatively consist of, sequences delineated in Table 1B, column 6, and have a nucleic acid sequence which is different from that contained in the BAC clone identified as BAC ID NO:A (see Table 1B, column 4). Polypeptides encoded by these polynucleotides, other polynucleotides that encode these polypeptides, and antibodies that bind these polypeptides are also encompassed by the invention. Additionally, fragments and variants of the above-described polynucleotides and polypeptides are also encompassed by the invention.

[0074] Further, representative examples of polynucleotides of the invention comprise, or alternatively consist of, one, two, three, four, five, six, seven, eight, nine, ten, or more of the sequences delineated in column 6 of Table 1B which correspond to the same Clone ID NO:Z (see Table 1B, column 1), or any combination thereof. Additional, representative examples of polynucleotides of the invention comprise, or alternatively consist of, one, two, three, four, five, six, seven, eight, nine, ten, or more of the complementary strand(s) of the sequences delineated in column 6 of Table 1B which correspond to the same Clone ID NO:Z (see Table 1B, column 1), or any combination thereof. In further embodiments, the above-described polynucleotides of the invention comprise, or alternatively consist of, sequences delineated in column 6 of Table 1B which correspond to the same Clone ID NO:Z (see Table 1B, column 1) and have a nucleic acid sequence which is different from that of the BAC fragment having the sequence disclosed in SEQ ID NO:B (see Table 1B, column 5). In additional embodiments, the above-described polynucleotides of the invention comprise, or alternatively consist of, sequences delineated in column 6 of Table 1B which correspond to the same Clone ID NO:Z (see Table 1B, column 1) and have a nucleic acid sequence which is different from that published for the BAC clone identified as BAC ID NO:A (see Table 1B, column 4). In additional embodiments, the above-described polynucleotides of the invention comprise, or alternatively consist of, sequences delineated in column 6 of Table 1B which correspond to the same Clone ID NO:Z (see Table 1B, column 1) and have a nucleic acid sequence which is different from that contained in the BAC clone identified as BAC ID NO:A (see Table 1B, column 4). Polypeptides encoded by these polynucleotides, other polynucleotides that encode these polypeptides, and antibodies that bind these polypeptides are also encompassed by the invention. Additionally, fragments and variants of the above-described polynucleotides and polypeptides are also encompassed by the invention.

[0075] Further, representative examples of polynucleotides of the invention comprise, or alternatively consist of, one, two, three, four, five, six, seven, eight, nine, ten, or more of the sequences delineated in column 6 of Table 1B which correspond to the same contig sequence identifer SEQ ID NO:X (see Table 1B, column 2), or any combination thereof. Additional, representative examples of polynucleotides of the invention comprise, or alternatively consist of, one, two, three, four, five, six, seven, eight, nine, ten, or more of the complementary strand(s) of the sequences delineated in column 6 of Table 1B which correspond to the same contig sequence identifer SEQ ID NO:X (see Table 1B, column 2), or any combination thereof. In further embodiments, the above-described polynucleotides of the invention comprise, or alternatively consist of, sequences delineated in column 6 of Table 1B which correspond to the same contig sequence identifer SEQ ID NO:X (see Table 1B, column 2) and have a nucleic acid sequence which is different from that of the BAC fragment having the sequence disclosed in SEQ ID NO:B (see Table 1B, column 5). In additional embodiments, the above-described polynucleotides of the invention comprise, or alternatively consist of, sequences delineated in column 6 of Table 1B which correspond to the same contig sequence identifer SEQ ID NO:X (see Table 1B, column 2) and have a nucleic acid sequence which is different from that published for the BAC clone identified as BAC ID NO:A (see Table 1B, column 4). In additional embodiments, the above-described polynucleotides of the invention comprise, or alternatively consist of, sequences delineated in column 6 of Table 1B which correspond to the same contig sequence identifer SEQ ID NO:X (see Table 1B, column 2) and have a nucleic acid sequence which is different from that contained in the BAC clone identified as BAC ID NO:A (See Table 1B, column 4). Polypeptides encoded by these polynucleotides, other polynucleotides that encode these polypeptides, and antibodies that bind these polypeptides are also encompassed by the invention. Additionally, fragments and variants of the above-described polynucleotides and polypeptides are also encompassed by the invention.

[0076] Moreover, representative examples of polynucleotides of the invention comprise, or alternatively consist of, one, two, three, four, five, six, seven, eight, nine, ten, or more of the sequences delineated in the same row of Table 1B column 6, or any combination thereof. Additional, representative examples of polynucleotides of the invention comprise, or alternatively consist of, one, two, three, four, five, six, seven, eight, nine, ten, or more of the complementary strand(s) of the sequences delineated in the same row of Table 1B column 6, or any combination thereof. In preferred embodiments, the polynucleotides of the invention comprise, or alternatively consist of, one, two, three, four, five, six, seven, eight, nine, ten, or more of the complementary strand(s) of the sequences delineated in the same row of Table 1B column 6, wherein sequentially delineated sequences in the table (i.e. corresponding to those exons located closest to each other) are directly contiguous in a 5′ to 3′ orientation. In further embodiments, above-described polynucleotides of the invention comprise, or alternatively consist of, sequences delineated in the same row of Table 1B, column 6, and have a nucleic acid sequence which is different from that of the BAC fragment having the sequence disclosed in SEQ ID NO:B (see Table 1B, column 5). In additional embodiments, the above-described polynucleotides of the invention comprise, or alternatively consist of, sequences delineated in the same row of Table 1B, column 6, and have a nucleic acid sequence which is different from that published for the BAC clone identified as BAC ID NO:A (see Table 1B, column 4). In additional embodiments, the above-described polynucleotides of the invention comprise, or alternatively consist of, sequences delineated in the same row of Table 1B, column 6, and have a nucleic acid sequence which is different from that contained in the BAC clone identified as BAC ID NO:A (see Table 1B, column 4). Polypeptides encoded by these polynucleotides, other polynucleotides that encode these polypeptides, and antibodies that bind these polypeptides are also encompassed by the invention.

[0077] In additional specific embodiments, polynucleotides of the invention comprise, or alternatively consist of, one, two, three, four, five, six, seven, eight, nine, ten, or more of the sequences delineated in column 6 of Table 1B, and the polynucleotide sequence of SEQ ID NO:X (e.g., as defined in Table 1B, column 2) or fragments or variants thereof. Polypeptides encoded by these polynucleotides, other polynucleotides that encode these polypeptides, and antibodies that bind these polypeptides are also encompassed by the invention.

[0078] In additional specific embodiments, polynucleotides of the invention comprise, or alternatively consist of, one, two, three, four, five, six, seven, eight, nine, ten, or more of the sequences delineated in column 6 of Table 1B which correspond to the same Clone ID NO:Z (see Table 1B, column 1), and the polynucleotide sequence of SEQ ID NO:X (e.g., as defined in Table 1A or 1B) or fragments or variants thereof. In preferred embodiments, the delineated sequence(s) and polynucleotide sequence of SEQ ID NO:X correspond to the same Clone ID NO:Z. Polypeptides encoded by these polynucleotides, other polynucleotides that encode these polypeptides, and antibodies that bind these polypeptides are also encompassed by the invention.

[0079] In further specific embodiments, polynucleotides of the invention comprise, or alternatively consist of, one, two, three, four, five, six, seven, eight, nine, ten, or more of the sequences delineated in the same row of column 6 of Table 1B, and the polynucleotide sequence of SEQ ID NO:X (e.g., as defined in Table 1A or 1B) or fragments or variants thereof. In preferred embodiments, the delineated sequence(s) and polynucleotide sequence of SEQ ID NO:X correspond to the same row of column 6 of Table 1B. Polypeptides encoded by these polynucleotides, other polynucleotides that encode these polypeptides, and antibodies that bind these polypeptides are also encompassed by the invention.

[0080] In additional specific embodiments, polynucleotides of the invention comprise, or alternatively consist of a polynucleotide sequence in which the 3′ 10 polynucleotides of one of the sequences delineated in column 6 of Table 1B and the 5′ 10 polynucleotides of the sequence of SEQ ID NO:X are directly contiguous. Nucleic acids which hybridize to the complement of these 20 contiguous polynucleotides under stringent hybridization conditions or alternatively, under lower stringency conditions, are also encompassed by the invention. Polypeptides encoded by these polynucleotides and/or nucleic acids, other polynucleotides and/or nucleic acids that encode these polypeptides, and antibodies that bind these polypeptides are also encompassed by the invention. Additionally, fragments and variants of the above-described polynucleotides, nucleic acids, and polypeptides are also encompassed by the invention.

[0081] In additional specific embodiments, polynucleotides of the invention comprise, or alternatively consist of, a polynucleotide sequence in which the 3′ 10 polynucleotides of one of the sequences delineated in column 6 of Table 1B and the 5′ 10 polynucleotides of a fragment or variant of the sequence of SEQ ID NO:X are directly contiguous Nucleic acids which hybridize to the complement of these 20 contiguous polynucleotides under stringent hybridization conditions or alternatively, under lower stringency conditions, are also encompassed by the invention. Polypeptides encoded by these polynucleotides and/or nucleic acids, other polynucleotides and/or nucleic acids encoding these polypeptides, and antibodies that bind these polypeptides are also encompassed by the invention. Additionally, fragments and variants of the above-described polynucleotides, nucleic acids, and polypeptides are also encompassed by the invention.

[0082] In specific embodiments, polynucleotides of the invention comprise, or alternatively consist of, a polynucleotide sequence in which the 3′ 10 polynucleotides of the sequence of SEQ ID NO:X and the 5′ 10 polynucleotides of the sequence of one of the sequences delineated in column 6 of Table 1B are directly contiguous. Nucleic acids which hybridize to the complement of these 20 contiguous polynucleotides under stringent hybridization conditions or alternatively, under lower stringency conditions, are also encompassed by the invention. Polypeptides encoded by these polynucleotides and/or nucleic acids, other polynucleotides and/or nucleic acids encoding these polypeptides, and antibodies that bind these polypeptides are also encompassed by the invention. Additionally, fragments and variants of the above-described polynucleotides, nucleic acids, and polypeptides are also encompassed by the invention.

[0083] In specific embodiments, polynucleotides of the invention comprise, or alternatively consist of, a polynucleotide sequence in which the 3′ 10 polynucleotides of a fragment or variant of the sequence of SEQ ID NO:X and the 5′ 10 polynucleotides of the sequence of one of the sequences delineated in column 6 of Table 1B are directly contiguous. Nucleic acids which hybridize to the complement of these 20 contiguous polynucleotides under stringent hybridization conditions or alternatively, under lower stringency conditions, are also encompassed by the invention. Polypeptides encoded by these polynucleotides and/or nucleic acids, other polynucleotides and/or nucleic acids encoding these polypeptides, and antibodies that bind these polypeptides are also encompassed by the invention. Additionally, fragments and variants of the above-described polynucleotides, nucleic acids, and polypeptides, are also encompassed by the invention.

[0084] In further specific embodiments, polynucleotides of the invention comprise, or alternatively consist of, a polynucleotide sequence in which the 3′ 10 polynucleotides of one of the sequences delineated in column 6 of Table 1B and the 5′ 10 polynucleotides of another sequence in column 6 are directly contiguous. Nucleic acids which hybridize to the complement of these 20 contiguous polynucleotides under stringent hybridization conditions or alternatively, under lower stringency conditions, are also encompassed by the invention. Polypeptides encoded by these polynucleotides and/or nucleic acids, other polynucleotides and/or nucleic acids encoding these polypeptides, and antibodies that bind these polypeptides are also encompassed by the invention. Additionally, fragments and variants of the above-described polynucleotides, nucleic acids, and polypeptides are also encompassed by the invention.

[0085] In specific embodiments, polynucleotides of the invention comprise, or alternatively consist of, a polynucleotide sequence in which the 3′ 10 polynucleotides of one of the sequences delineated in column 6 of Table 1B and the 5′ 10 polynucleotides of another sequence in column 6 corresponding to the same Clone ID NO:Z (see Table 1B, column 1) are directly contiguous. Nucleic acids which hybridize to the complement of these 20 lower stringency conditions, are also encompassed by the invention. Polypeptides encoded by these polynucleotides and/or nucleic acids, other polynucleotides and/or nucleic acids encoding these polypeptides, and antibodies that bind these polypeptides are also encompassed by the invention. Additionally, fragments and variants of the above-described polynucleotides, nucleic acids, and polypeptides are also encompassed by the invention.

[0086] In specific embodiments, polynucleotides of the invention comprise, or alternatively consist of, a polynucleotide sequence in which the 3′ 10 polynucleotides of one sequence in column 6 corresponding to the same contig sequence identifer SEQ ID NO:X (see Table 1B, column 2) are directly contiguous. Nucleic acids which hybridize to the complement of these 20 contiguous polynucleotides under stringent hybridization conditions or alternatively, under lower stringency conditions, are also encompassed by the invention. Polypeptides encoded by these polynucleotides and/or nucleic acids, other polynucleotides and/or nucleic acids encoding these polypeptides, and antibodies that bind these polypeptides are also encompassed by the invention. Additionally, fragments and variants of the above-described polynucleotides, nucleic acids, and polypeptides are also encompassed by the invention.

[0087] In specific embodiments, polynucleotides of the invention comprise, or alternatively consist of a polynucleotide sequence in which the 3′ 10 polynucleotides of one of the sequences delineated in column 6 of Table 1B and the 5′ 10 polynucleotides of another sequence in column 6 corresponding to the same row are directly contiguous. In preferred embodiments, the 3′ 10 polynucleotides of one of the sequences delineated in column 6 of Table 1B is directly contiguous with the 5′ 10 polynucleotides of the next sequential exon delineated in Table 1B, column 6. Nucleic acids which hybridize to the complement of these 20 contiguous polynucleotides under stringent hybridization conditions or alternatively, under lower stringency conditions, are also encompassed by the invention. Polypeptides encoded by these polynucleotides and/or nucleic acids, other polynucleotides and/or nucleic acids encoding these polypeptides, and antibodies that bind these polypeptides are also encompassed by the invention. Additionally, fragments and variants of the above-described polynucleotides, nucleic acids, and polypeptides are also encompassed by the invention.

[0088] Many polynucleotide sequences, such as EST sequences, are publicly available and accessible through sequence databases and may have been publicly available prior to conception of the present invention. Preferably, such related polynucleotides are specifically excluded from the scope of the present invention. Accordingly, for each contig sequence (SEQ ID NO:X) listed in the fourth column of Table 1A, preferably excluded are one or more polynucleotides comprising a nucleotide sequence described by the general formula of a-b, where a is any integer between 1 and the final nucleotide minus 15 of SEQ ID NO:X, b is an integer of 15 to the final nucleotide of SEQ ID NO:X, where both a and b correspond to the positions of nucleotide residues shown in SEQ ID NO:X, and where b is greater than or equal to a +14. More specifically, preferably excluded are one or more polynucleotides comprising a nucleotide sequence described by the general formula of a−b, where a and b are integers as defined in columns 4 and 5, respectively, of Table 3. In specific embodiments, the polynucleotides of the invention do not consist of at least one, two, three, four, five, ten, or more of the specific polynucleotide sequences referenced by the Genbank Accession No. as disclosed in column 6 of Table 3 (including for example, published sequence in connection with a particular BAC clone). In further embodiments, preferably excluded from the invention are the specific polynucleotide sequence(s) contained in the clones corresponding to at least one, two, three, four, five, ten, or more of the available material having the accession numbers identified in the sixth column of this Table (including for example, the actual sequence contained in an identified BAC clone). In no way is this listing meant to encompass all of the sequences which may be excluded by the general formula, it is just a representative example. All references available through these accessions are hereby incorporated by reference in their entirety.

TABLE 3

| | SEQ | | | | |
|---|---|---|---|---|---|
| Clone ID | ID | Contig | EST Disclaimer | | |
| NO: Z | NO: X | ID: | Range of a | Range of b | Accession #'s |
| HTPAD46 | 11 | 1048901 | 1-1561 | 15-1575 | AW026547, AL119230, AI992054, |
| | | | | | AI968455, AW193784, AW193801, |
| | | | | | AA386091, AA386130, AI825443, |
| | | | | | AA004475, and Z79235. |
| HCWFF88 | 12 | 1092566 | 1-639 | 15-653 | |
| HSSAX53 | 13 | 1198889 | 1-348 | 15-362 | |
| HCEPH71 | 14 | 522739 | 1-432 | 15-446 | AA326209, AA383931, AL365319, and |
| | | | | | AL390715. |
| HTEDF74 | 15 | 1083405 | 1-1265 | 15-1279 | AI948732, AW023798, AA058811, |
| | | | | | AA148838, C01936, and AA663155. |
| HTTEK47 | 16 | 1134534 | 1-1221 | 15-1235 | AI651805, AI989837, AI718022, |
| | | | | | AA400005, AI458374, AA401437, |
| | | | | | AW205244, AA883445, AI478808, |
| | | | | | AW134723, AI689951, AI269389, |
| | | | | | AA865056, AI640798, H11911, R44433, |
| | | | | | AI688852, AI183700, AA424180, |
| | | | | | AI277599, R46805, and AA771819. |
| HTOBE75 | 17 | 1163883 | 1-1797 | 15-1811 | AW192827, AA595431, AI251121, |
| | | | | | AI923335, AI284016, H30141, T70540, |
| | | | | | T90549, AI432106, AA953436, H27466, |
| | | | | | R50714, R50249, AI540363, T70809, |
| | | | | | AI659868, AW370667, Z99572, I36305, |
| | | | | | AL022146, M87861, M72332, M60235, |
| | | | | | L39075, M60230, M60228, M60231, |
| | | | | | M60229, M60232, M60227, and M60234. |
| HCFAT05 | 18 | 1156310 | 1-2145 | 15-2159 | AL133816, AA811374, AI095381, |
| | | | | | M38217, M55515, L23499, M85217, |
| | | | | | X16001, M30312, M31744, AR050270, |
| | | | | | U38240, U38182, U96110, and U45979. |
| HFIAH37 | 19 | 1189001 | 1-1712 | 15-1726 | AL134903, AI912243, AA976922, |
| | | | | | AI742663, AW028771, AW043595, |
| | | | | | AA478697, AA837145, W49831, |
| | | | | | AI354405, AA412384, AA602982, N62994, |
| | | | | | AA013476, AI674206, AA115419, |
| | | | | | AI377356, AW270325, AI479159, |
| | | | | | AA169423, AA133086, AA326624, |
| | | | | | H83962, R76363, AA587840, AI224540, |
| | | | | | H67227, H81547, AA665443, AA018206, |
| | | | | | AA662495, AW298791, AA251488, |
| | | | | | AA301274, AA132987, AI192416, |
| | | | | | AI300307, AA722928, AA478563, R76688, |
| | | | | | AA579347, AA501519, AA629042, |
| | | | | | AI299974, H70300, AI865166, AA252018, |
| | | | | | N79902, AI867958, AI300195, AA251195, |
| | | | | | AA251787, H65133, AW246148, |
| | | | | | AA644296, AA115418, AC004381, and |
| | | | | | AF227510. |
| HFTDF15 | 20 | 1084887 | 1-715 | 15-729 | AA837715, AI623899, AA775049, |
| | | | | | AA317045, AA581914, AA679872, |
| | | | | | T03203, AA780929, AI634323, AA604843, |
| | | | | | AA904275, AW440633, AA362395, |
| | | | | | AA468486, AI582890, AA640979, |
| | | | | | AL046746, AA721615, H67866, |
| | | | | | AA632960, AI561116, AL120976, |
| | | | | | AI978792, AA663306, AF034193, |
| | | | | | AW302293, AF108083, AC005486, |
| | | | | | AL109985, AC007229, U47924, |
| | | | | | AC008249, AL031289, AC004031, |
| | | | | | AC003029, AC005899, AL022721, |
| | | | | | AC003982, Z97053, AC004134, |
| | | | | | AC004883, AC005839, AC003670, |
| | | | | | AC005746, AP000018, AL135744, |
| | | | | | AC005037, AL021808, Z95889, |
| | | | | | AC006071, AC005480, AC004815, |
| | | | | | AP000159, AC007551, AL031670, |
| | | | | | AC000117, I59642, AC005346, L39891, |
| | | | | | AF039906, AC008372, AL034420, |
| | | | | | AL078611, AC007055, AF134726, |
| | | | | | AL049643, AL121769, AL031447, |
| | | | | | AC003038, AL096701, AL031257, |
| | | | | | AL035690, AL050318, AL035681, |
| | | | | | AL049745, AL031589, AC005412, |
| | | | | | AC007792, AL049636, AL008583, |
| | | | | | AL021878, AL049569, AC007536, |
| | | | | | AF165926, AC005234, AL022237, |
| | | | | | AL031848, AL022149, AC004990, |
| | | | | | AC006501, AL023553, AC007363, |
| | | | | | AC005696, AL035455, AC006120, |
| | | | | | AL031282, AL050309, AC016830, |
| | | | | | AC005881, AC005529, AC004929, |
| | | | | | AC006459, AC007308, AC002319, |
| | | | | | AC002477, AL031277, AC003669, |
| | | | | | AC002470, AF196969, Z82215, AC006039, |
| | | | | | AL049780, AC006578, AF111168, |
| | | | | | AF207550, AF064864, AF165176, |
| | | | | | AL033521, AC004821, AC003663, |
| | | | | | AC004655, AF205588, AL096757, |
| | | | | | AC002429, AC005527, AL034402, |
| | | | | | AL031775, AC002077, AC009498, |
| | | | | | AC006006, AJ011930, AC005082, |
| | | | | | AL031650, AC005695, AL109627, |
| | | | | | AC000003, AC005264, AC007934, |
| | | | | | AC005086, Z83838, AC005777, |
| | | | | | AL133304, Z97630, AC003101, |
| | | | | | AC004034, AC004672, AL022320, |
| | | | | | AP000475, AC004905, Z98052, AL078581, |
| | | | | | AC004517, AL021997, AC006139, |
| | | | | | AC005996, AC005380, AC002395, |
| | | | | | AC006023, Z82244, AL034423, AF001550, |
| | | | | | AL031685, AL008723, AC005102, |
| | | | | | AC007199, AC007151, AC003043, |
| | | | | | AF037222, AL008710, AC007193, |
| | | | | | AC005081, AC004921, AL022329, |
| | | | | | AC005520, AC005039, AL035587, |
| | | | | | Z98051, AC020663, AC016027, |
| | | | | | AC006211, AC003104, Z69921, |
| | | | | | AL133246, AC005049, AL049869, |
| | | | | | AC002091, AC005225, and AL033504. |
| HPFCU80 | 21 | 1017593 | 1-328 | 15-342 | AC005344. |
| HSVAW49 | 22 | 1153916 | 1-991 | 15-1005 | AF146277, U95740, AL008731, |
| | | | | | AC002551, and AL079342. |
| HWHQC94 | 23 | 1116463 | 1-904 | 15-918 | AI366191, AC004472, AC005259, and |
| | | | | | AW469987. |
| HRSMD49 | 24 | 1065458 | 1-442 | 15-456 | AA136820. |
| HFTDY67 | 25 | 1151220 | 1-1523 | 15-1537 | AI335266, AI751901, AI751815, |
| | | | | | AI750604, AI040116, AW067945, |
| | | | | | AW239149, AI572373, N42174, N22119, |
| | | | | | N71503, AF182316, AF182317, AB033033, |
| | | | | | AR018882, and AB026436. |
| HYABL89 | 26 | 1090733 | 1-700 | 15-714 | |
| HCUEV29 | 27 | 1137791 | 1-703 | 15-717 | AI570209, AA583494, AW337550, |
| | | | | | AW087991, AI027766, H17041, |
| | | | | | AW410192, AI669151, T30350, |
| | | | | | AA335428, C16961, AA878169, |
| | | | | | AW411072, AW410900, T24722, |
| | | | | | AA365566, AA365567, AI418046, |
| | | | | | AA350018, AW246233, and AL031283. |
| HCESP56 | 28 | 1121751 | 1-506 | 15-520 | AW247740, AW247029, AW204207, |
| | | | | | W39269, AA325536, R14422, W52568, |
| | | | | | Y16752, AL022170, and Z65186. |
| HLQDT35 | 29 | 1154064 | 1-1308 | 15-1322 | AI659435, AW006450, AI380742, |
| | | | | | AI953510, AI078578, AA707183, |
| | | | | | AI453381, AI445431, AW136858, |
| | | | | | AA807157, AW196880, AA131680, |
| | | | | | AI569636, AI140912, AA530976, |
| | | | | | AA410746, AA134742, AA152440, |
| | | | | | AA807317, AA283695, N66180, AI082380, |
| | | | | | AI269183, AA480063, AA635830, |
| | | | | | AA433870, AI631995, AI167742, |
| | | | | | AA292134, AA131985, AA923686, |
| | | | | | AI580936, N30879, AI358691, AA631878, |
| | | | | | AA485099, AA485100, AA165214, |
| | | | | | AA253107, H92198, AI160395, AA830846, |
| | | | | | AI753274, AA253052, AA152441, |
| | | | | | AA879095, R08557, R11497, AA358765, |
| | | | | | AA706241, AA134743, AI424722, |
| | | | | | AI800536, R08654, R10421, N99172, |
| | | | | | T89988, AA804424, W16996, AI934059, |
| | | | | | AA481922, AA292133, AA746933, |
| | | | | | N56752, AA290907, AI091625, and |
| | | | | | AL137699. |
| HDPBS64 | 30 | 846624 | 1-743 | 15-757 | AA888874, AA992389, and AI767840. |
| HTBAB41 | 31 | 1052388 | 1-785 | 15-799 | AA382198, H48825, H58945, and |
| | | | | | AI359780. |
| HTLGE31 | 32 | 870247 | 1-519 | 15-533 | AA714179, AW051497, AI971919, |
| | | | | | AI094911, AW055123, AA293722, |
| | | | | | AI094408, and AA631985. |
| HWLHK29 | 33 | 1152279 | 1-941 | 15-955 | AA243837, AA588755, AW137873, |
| | | | | | AI351894, AA360896, AI903764, R33743, |
| | | | | | AL045500, AL039086, AL036802, |
| | | | | | AL046849, AI906328, AL042628, |
| | | | | | AW129106, AL036638, AL119791, |
| | | | | | AI312428, AL036396, AW163554, |
| | | | | | AL041562, AI690887, AL079963, |
| | | | | | AL036631, AL037463, AL135661, |
| | | | | | AI581033, AW020397, AW022682, |
| | | | | | AL134598, AW238730, AW105601, |
| | | | | | AI349772, AW023338, AI349937, |
| | | | | | AI623941, AI537677, AA225339, |
| | | | | | AA470491, AW059828, AW020419, |
| | | | | | AL110306, AI279925, AI929108, |
| | | | | | AI580290, AI624859, AI538885, |
| | | | | | AI207510, AW268253, AL042166, |
| | | | | | AI312152, AL046944, AI613038, |
| | | | | | AI446373, AI590423, AA572758, |
| | | | | | AL041016, AI678446, AL042544, N29277, |
| | | | | | AL042382, AI340519, AI340603, |
| | | | | | AI580190, AI345111, AI907070, |
| | | | | | AL119748, AW044029, AI866691, |
| | | | | | AA640779, AL041150, AI433157, |
| | | | | | AI281867, AA641818, AI886594, |
| | | | | | AI345347, AI366974, AW162194, |
| | | | | | AI345415, AI473451, AI348897, |
| | | | | | AW020710, AI539800, AW149876, |
| | | | | | AI624943, AI251221, AI349933, |
| | | | | | AA420722, AI923989, AI284517, |
| | | | | | AA580663, AI500061, AI628325, |
| | | | | | AL135025, AW021717, AI868204, |
| | | | | | AI440263, AI699143, AI247193, |
| | | | | | AW051059, AI345735, AL042745, |
| | | | | | AL037454, AI344910, AI863014, |
| | | | | | AL047344, AW020693, AI538637, |
| | | | | | AI433976, AL121328, AW074869, |
| | | | | | AW189301, AW162189, AI801793, |
| | | | | | AI244249, AI064830, AL047042, |
| | | | | | AI445430, AW020460, AI357599, |
| | | | | | AI349256, AW021140, AI277008, |
| | | | | | AW022861, AW068845, AI698391, |
| | | | | | AI687568, AI815232, AW050578, |
| | | | | | AW023859, AI149592, AI307708, |
| | | | | | AL046931, AI680498, AA579232, |
| | | | | | AA635382, AL119399, AI340627, |
| | | | | | AW167918, AI349645, AW089572, |
| | | | | | AL120307, AL040241, AI690946, |
| | | | | | AW150578, AW151136, AI953765, |
| | | | | | AW403717, AI559752, AL121270, |
| | | | | | AI436429, AI590043, AI452857, |
| | | | | | AI798456, N57346, AI802542, AL042191, |
| | | | | | AA806719, AI567582, AI540674, |
| | | | | | AL038575, AL043070, AL040694, |
| | | | | | AA494167, AI916419, AW058233, |
| | | | | | AI573026, AI471227, AL118781, |
| | | | | | AI920968, AI589668, AI345612, |
| | | | | | AI345688, AW082532, F37439, AI610362, |
| | | | | | AL120736, AL036664, AL043168, |
| | | | | | AL119836, AI866465, AW074993, |
| | | | | | AW268072, AL043345, AI554343, |
| | | | | | AW191003, AL038605, AI866608, |
| | | | | | AI345608, AW268261, AI471898, |
| | | | | | AL036240, AW021373, AW020561, |
| | | | | | AL041772, AI114703, AI475371, |
| | | | | | AI582912, AL036736, AA693314, |
| | | | | | AI554821, AI287446, AI307569, |
| | | | | | AI345253, AA848053, AL048323, |
| | | | | | AA613907, AI345416, AW268067, |
| | | | | | AI313320, AW081383, AI624548, |
| | | | | | AL048340, AI343030, N22276, |
| | | | | | AW020095, AI310606, F35428, AL135022, |
| | | | | | AL036274, AW151138, AI915295, |
| | | | | | AL047422, AI345370, AW166645, |
| | | | | | AI312146, AI560012, AI312339, |
| | | | | | AI890907, AL036403, AW059638, |
| | | | | | AI921254, AW161202, AW022102, |
| | | | | | AI348854, AI345258, AI249946, W48671, |
| | | | | | AL119511, AL040243, AA528822, |
| | | | | | AI434223, AL037582, AL037602, |
| | | | | | AI612885, AW080402, AI801325, |
| | | | | | AA070889, AI273791, AW274192, |
| | | | | | AW163834, I48978, S78214, I48979, |
| | | | | | AR013797, AF090934, Y11587, |
| | | | | | AL133640, AF078844, AC006313, |
| | | | | | AF113691, AL137479, AL133016, |
| | | | | | AL050393, AL117457, AF215669, |
| | | | | | AL137459, AL137478, AF090900, |
| | | | | | AF118064, AL133075, AF081197, |
| | | | | | AF081195, A58524, A58523, AJ012755, |
| | | | | | AF126247, AF090943, AL117460, X84990, |
| | | | | | D16301, I89947, AF090901, U75932, |
| | | | | | Y10655, AL049938, AF118070, AL137529, |
| | | | | | AF090896, AL133606, AL122123, X99257, |
| | | | | | A08916, AF125949, AL137429, AL122050, |
| | | | | | AL122100, AL050146, A18777, I03321, |
| | | | | | AF111851, AL117629, I09499, AF158248, |
| | | | | | AF113013, X06146, X82434, Y16645, |
| | | | | | A08910, AF113019, A08909, AL049382, |
| | | | | | A08913, AL137705, AL122093, |
| | | | | | AL110196, AL049314, AL137527, I89931, |
| | | | | | AL137538, S61953, AF097996, E05822, |
| | | | | | E06743, L31396, AL050138, E02221, |
| | | | | | L31397, AJ242859, X70514, AF114170, |
| | | | | | AF090903, AL137294, AL080060, A08907, |
| | | | | | A08908, U77594, X80340, AL122111, |
| | | | | | AB007812, AL096744, AF039138, |
| | | | | | AF039137, AL133113, AF061573, X72889, |
| | | | | | I49625, AJ000937, AF069506, AF176651, |
| | | | | | AL137558, A93016, AL122110, AF113690, |
| | | | | | AF100931, AF017437, S78453, A65340, |
| | | | | | AL133093, AL080154, AL110197, |
| | | | | | AL117416, A07647, AL122118, AF030513, |
| | | | | | AR034821, AL137555, A03736, |
| | | | | | AR011880, AR038854, AL110159, S75997, |
| | | | | | Y11254, AF118090, AJ238278, AF017152, |
| | | | | | X65873, U42766, AF061943, AL050277, |
| | | | | | AF100781, AL050024, AF132676, |
| | | | | | AL122106, AF061836, AL122098, |
| | | | | | AF026124, AF057300, AL110225, |
| | | | | | AF057299, AL050092, AL096751, |
| | | | | | AF036941, AL133067, E02349, A08912, |
| | | | | | AL137548, AL110280, AF113694, S36676, |
| | | | | | A77033, A77035, AR000496, AF113699, |
| | | | | | U39656, X89102, U55017, X67688, |
| | | | | | AL133557, AL117649, I66342, AL137550, |
| | | | | | AL137656, S77771, AF106657, E01614, |
| | | | | | E13364, AF079765, AL137292, AB019565, |
| | | | | | U51587, AF113677, X59414, AL080158, |
| | | | | | U87620, AL050116, Z97214, AL137533, |
| | | | | | AF177401, AL117435, U72620, AL133560, |
| | | | | | AF113689, AL137526, AL080074, I33392, |
| | | | | | AL137271, AF192557, U96683, AF146568, |
| | | | | | AL137488, AL137521, X63574, AF102578, |
| | | | | | S76508, I89934, AF026816, A65341, |
| | | | | | AL049283, AL049466, AF200464, |
| | | | | | AF079763, AF111849, AL117585, |
| | | | | | AL049452, E07108, AL050108, A21101, |
| | | | | | AF180525, A52563, AL133619, L04504, |
| | | | | | X53587, A18788, AL080124, AL117648, |
| | | | | | AL137557, AF065135, AR038969, |
| | | | | | AL049430, X55446, AF090886, Y09972, |
| | | | | | AL133112, U00763, E03671, AL133080, |
| | | | | | X70685, U58996, AL137648, AL133565, |
| | | | | | AF104032, AL133081, AF031147, |
| | | | | | M96857, AL080137, X57961, AL133665, |
| | | | | | I68732, U66059, D83032, AF162270, |
| | | | | | AC004200, Y10080, AF111112, S83456, |
| | | | | | AL136884, AF003737, AL049300, |
| | | | | | AL117432, and AL050366. |
| HHEGG20 | 34 | 1106816 | 1-958 | 15-972 | AF084205, and AW473942. |
| HDPRU43 | 35 | 1217035 | 1-2939 | 15-2953 | AI912020, AI738591, AI673200, |
| | | | | | AW195629, AI914327, AW207103, |
| | | | | | AI858984, AI016102, AI948562, |
| | | | | | AI021976, AA515654, AA824295, |
| | | | | | AI288261, AW003109, AA029227, |
| | | | | | AI332790, AI863407, AW271426, |
| | | | | | AA447206, AW197033, AI673222, |
| | | | | | AA846300, AI093417, AW274813, |
| | | | | | AA917651, AI989749, AI198249, |
| | | | | | AI933079, AW337461, AA149282, |
| | | | | | AA476264, AA029228, N89854, AI650694, |
| | | | | | Z28929, AA149376, R53155, AA805734, |
| | | | | | AI862408, AW374891, AA010232, |
| | | | | | AW137892, AW250017, AA077657, |
| | | | | | H43959, AA077229, AI400383, AA077669, |
| | | | | | AI971136, AA076731, AW405369, |
| | | | | | AI862409, AW386712, AW386708, |
| | | | | | R49809, R43152, H22270, AA077893, |
| | | | | | AA889934, F00253, AF139794, M91506, |
| | | | | | AA077980, AI282751, AA077825, |
| | | | | | AA010157, F01048, AW393714, |
| | | | | | AA078429, AA077544, AI768799, |
| | | | | | AA076983, AA076893, AI125178, |
| | | | | | AW205906, AW373785, AI963990, |
| | | | | | AB011110, AC004084, and AC004985. |
| HE8PK12 | 36 | 1227647 | 1-3678 | 15-3692 | AI675352, AA404223, N21458, |
| | | | | | AW377007, AW055240, AW376965, |
| | | | | | W72194, AI744480, AW377009, |
| | | | | | AA460033, AA689223, AI151138, |
| | | | | | AW367398, AI204462, AW367559, |
| | | | | | AI814765, AA514481, AA514486, |
| | | | | | AL041934, AI378530, AI127602, |
| | | | | | AI805975, AI816548, AA459944, |
| | | | | | AI079813, H99690, N69075, AI220492, |
| | | | | | AI924878, AA894562, AA227526, |
| | | | | | AW440516, AA652186, W78757, |
| | | | | | AI769346, AI223789, AA663829, R74386, |
| | | | | | AI129571, AI679615, T08944, W80492, |
| | | | | | N35223, AI366554, AA884120, AA227665, |
| | | | | | W04635, AI025087, AI141989, AI276061, |
| | | | | | AI131356, AI057082, N76793, AW089172, |
| | | | | | AA758991, AI149095, AW089170, |
| | | | | | N69065, H82484, AI366370, W31730, |
| | | | | | N44887, R78350, AI868614, M85694, |
| | | | | | T07736, AA404607, AI167295, H13964, |
| | | | | | AI351984, AA704854, AI832531, Z43566, |
| | | | | | AW008608, T30004, T35144, AW023452, |
| | | | | | R62595, R83633, AA978218, R77974, |
| | | | | | R62643, R84838, R73944, D62538, |
| | | | | | C04805, W77830, Z39632, AA663708, |
| | | | | | AA258404, AA904920, AI915380, T30003, |
| | | | | | T30824, AA016152, AA296029, AI139527, |
| | | | | | H22033, AA555134, AA776071, D50973, |
| | | | | | AA216002, AW148599, AA249464, |
| | | | | | H22108, AA369404, AA194728, |
| | | | | | AW367406, D79628, AI800441, |
| | | | | | AL117472, AL122082, U58883, AF136380, |
| | | | | | AF136381, AF078667, and AF078666. |
| HE9HV92 | 37 | 1227519 | 1-3422 | 15-3436 | AW451462, AW389371, AA469982, |
| | | | | | AW389370, AW389367, AI625782, |
| | | | | | N62808, AW389369, AW367986, |
| | | | | | AW389368, AW389596, AW389606, |
| | | | | | AW044368, AA679038, AI493173, |
| | | | | | AW083020, AI280052, AI634922, |
| | | | | | AA402837, AW377678, AW389366, |
| | | | | | N33240, AI805314, AW004651, AI141651, |
| | | | | | N93923, AI000968, AF114067, AI922980, |
| | | | | | AA910867, AA918883, AW389616, |
| | | | | | H98243, H29386, H29296, H98939, |
| | | | | | AW367988, AW028291, F11743, |
| | | | | | AW002598, AI143427, AI679840, |
| | | | | | AA709068, AA402687, AA927333, |
| | | | | | AI183648, W01827, AW367982, Z45487, |
| | | | | | F06551, T65373, AW367985, AW389594, |
| | | | | | AW367974, AI679265, AW367968, |
| | | | | | AI569013, N79690, AA412251, N70773, |
| | | | | | AA994823, AI588847, AW377594, |
| | | | | | AA886715, AW139939, Z39513, F04059, |
| | | | | | F09403, F04352, AA348028, AI700831, |
| | | | | | R12190, AW139934, AI275660, AI253408, |
| | | | | | AI423822, R35809, AW389634, |
| | | | | | AW389639, Z45167, AW295763, |
| | | | | | AW389633, AW389637, R39914, |
| | | | | | AW389632, AA336725, T65450, |
| | | | | | AW389643, N41955, M78477, AW389640, |
| | | | | | AW389626, N56035, AW083017, |
| | | | | | AA343776, AW389615, AW389623, |
| | | | | | AW389628, AI802303, AW389641, |
| | | | | | AW389630, AW389359, AW389354, |
| | | | | | AA961766, AB007860, I74314, I74317, |
| | | | | | AF069506, AW627522, and AW630555. |
| HOHCE47 | 38 | 1217059 | 1-2131 | 15-2145 | AI902550, AA852921, AW449324, and |
| | | | | | AB018324. |
| HSDII69 | 39 | 1154067 | 1-1418 | 15-1432 | AA203346, AA203330, AI024792, |
| | | | | | AI383978, AA489694, AA658936, |
| | | | | | AI912487, AA640288, AW022618, |
| | | | | | AA115749, AA669824, AW296909, |
| | | | | | AW024848, AA133454, AA552781, |
| | | | | | AI332862, T86475, AI332863, AA665267, |
| | | | | | AA640358, AI625278, AA878769, T31809, |
| | | | | | AA318980, T86474, Z24863, and |
| | | | | | AL049423. |
| HKAKM10 | 40 | 1227639 | 1-3921 | 15-3935 | AW166113, AI762270, AI761800, |
| | | | | | AI968494, AI935006, AI393355, |
| | | | | | AA885443, AA847857, AW044423, |
| | | | | | AI188200, AW085175, T66118, AI935038, |
| | | | | | AW003121, AI356390, AA588552, |
| | | | | | AI475498, AI139170, N63644, AW450561, |
| | | | | | AW088729, R70631, AI203354, AI239443, |
| | | | | | W45495, AA654175, H95337, AI002826, |
| | | | | | AA578373, F10209, AI468683, F09647, |
| | | | | | T83850, AA317152, T65033, AA641861, |
| | | | | | AW196381, AI350190, F12591, AI383380, |
| | | | | | W40418, F12002, T74348, W23298, |
| | | | | | R70529, T89046, N80491, AI474886, |
| | | | | | R88730, AB014530, AF071070, AF170304, |
| | | | | | AF077658, AF170303, and AF071071. |
| HCEPU56 | 41 | 1226120 | 1-2754 | 15-2768 | AL134903, AW043595, AI912243, |
| | | | | | AA602982, AI674206, AA976922, |
| | | | | | AI224540, AA662495, AI742663, |
| | | | | | AW028771, AA478697, AA837145, |
| | | | | | AI354405, W49831, AA132987, |
| | | | | | AA412384, N62994, AI300307, AA013476, |
| | | | | | AA115419, AA722928, AI377356, |
| | | | | | AA478563, AW270325, AI479159, |
| | | | | | R76688, AA579347, Z43536, AA629042, |
| | | | | | AA169423, AA326624, H83962, |
| | | | | | AA133086, R76363, AA665443, |
| | | | | | AA587840, H67227, H81547, AA018206, |
| | | | | | AW298791, AA251488, AA301274, |
| | | | | | AI300195, AI192416, AI867958, |
| | | | | | AA501519, AI299974, H70300, AA644296, |
| | | | | | AI865166, AA252018, N79902, AA251195, |
| | | | | | AA251787, H65133, T26917, N83883, |
| | | | | | T26928, AL045327, AL045328, AL134524, |
| | | | | | AL134110, AL038878, AL047163, |
| | | | | | AW246148, AL042898, U46344, |
| | | | | | AI318479, AL037295, AL038838, |
| | | | | | AL048677, AL037343, AL038651, |
| | | | | | AI547295, AL038983, AI142134, D29033, |
| | | | | | AL037436, AL037335, AL037323, |
| | | | | | AL135012, AL037727, AL037443, |
| | | | | | AL038532, AL038822, AL038761, |
| | | | | | AL037435, AL040472, AL043941, |
| | | | | | AL039432, AL045494, AL044125, |
| | | | | | AL043923, AL043814, AL047012, |
| | | | | | AL041238, AL044186, AL040617, |
| | | | | | AL043845, AL041347, AL038024, |
| | | | | | AL040576, AL040193, AL045753, |
| | | | | | AL042523, AL041955, AL040463, |
| | | | | | AL047170, AL048657, AL044037, |
| | | | | | AL041635, AL040294, AL044064, |
| | | | | | AL041459, AL041577, AL044162, |
| | | | | | AL040464, AL047219, AL040625, |
| | | | | | AL045684, AL041752, AL046850, |
| | | | | | AL040768, AL045671, AL046994, |
| | | | | | AL048714, AL046914, AL045891, |
| | | | | | AL039360, AL038745, AL040052, |
| | | | | | AL043496, AL040444, AL043538, |
| | | | | | AL040621, AL040510, AL043467, |
| | | | | | AL043677, AL040839, AL043492, |
| | | | | | AL041602, AL044074, AL041730, |
| | | | | | AL041523, AL043627, AL041374, |
| | | | | | AL043848, AL043570, AL047183, |
| | | | | | AL042135, AL042655, AL046442, |
| | | | | | AL041324, AA115418, AL041133, |
| | | | | | AL039643, AL039316, AL041098, |
| | | | | | AL040322, AL046392, AL043089, |
| | | | | | AL040119, AL044272, AL044258, |
| | | | | | AL042420, AL037341, AL042468, |
| | | | | | AL038040, AL041096, AL042096, |
| | | | | | AL045817, AL041168, AL049018, |
| | | | | | AL079852, AL043321, AL041163, |
| | | | | | AL041159, AW363350, AL045920, |
| | | | | | AL040148, AL042741, AL047057, |
| | | | | | AL038041, AL040458, AL044187, |
| | | | | | AL046356, AF227510, AC004381, |
| | | | | | AR066494, AJ238010, A93923, A93916, |
| | | | | | D17247, A93931, AR064707, AL133053, |
| | | | | | AL122101, A85203, AR023813, |
| | | | | | AW611706, and AW769812. |
| HUSHB54 | 42 | 928054 | 1-343 | 15-357 | AA348022. |
| HLMDO95 | 43 | 928344 | 1-469 | 15-483 | AC020641. |
| HHASQ32 | 44 | 1198902 | 1-880 | 15-894 | H00195, AI251764, AL042753, |
| | | | | | AW117882, AI349772, AL047763, |
| | | | | | AL121270, AI868831, AI433976, |
| | | | | | AW162071, AL047042, AI064830, |
| | | | | | AI436456, AI815383, AI433157, |
| | | | | | AL135661, AL036146, AI500077, |
| | | | | | AL119791, AL036396, AW268253, |
| | | | | | AL045500, AL046849, AA640779, |
| | | | | | AI349645, AI500553, AL036802, |
| | | | | | AW071349, AI687376, AI679724, |
| | | | | | AL119049, AI568870, AI863014, |
| | | | | | AI608667, AI690751, AI702406, |
| | | | | | AA613907, AW303152, AL121365, |
| | | | | | AI567351, AI349933, AI920968, |
| | | | | | AW238730, AI207510, AI873731, |
| | | | | | AL040169, AI687728, AI538716, |
| | | | | | AI469532, AI580190, AL036759, |
| | | | | | AI567632, AL119748, AW103371, |
| | | | | | AI673256, AL120854, AI934036, |
| | | | | | AI969601, AW166645, AI340582, |
| | | | | | AW080838, AW089572, AI907070, |
| | | | | | AI687415, AI521012, AI440426, |
| | | | | | AI906328, AW074993, AL036980, |
| | | | | | AI499393, AI349256, AI312152, |
| | | | | | AI753683, AW274192, AI969567, |
| | | | | | AI349937, AW302965, AI349614, |
| | | | | | AI349004, AI349598, AL038605, |
| | | | | | AI889203, AA585422, AI251485, |
| | | | | | AI343112, AL036274, AI343059, |
| | | | | | AL120736, AL036240, AI818683, |
| | | | | | AW132121, AW301409, AI282655, |
| | | | | | AA572758, AI609592, AI678302, |
| | | | | | AW235035, AI285735, AI250293, |
| | | | | | AI799305, AI309401, AI631107, |
| | | | | | AW195957, AI366549, AI281779, |
| | | | | | AW071417, AI149592, AI583316, |
| | | | | | AI690835, AI340519, AI345860, |
| | | | | | AI909666, AI686926, AI345744, |
| | | | | | AI475371, AI345735, AW087445, |
| | | | | | AI696846, AI498579, AI439087, |
| | | | | | AI497733, AI636456, AI813914, |
| | | | | | AI307466, AI366991, AI682743, |
| | | | | | AI907061, AI866608, AI275175, |
| | | | | | AI597918, AI635461, AI345111, |
| | | | | | AI909662, AW169653, AI635942, |
| | | | | | AI624859, AI671679, AA528491, |
| | | | | | AW068845, AI564719, AI699857, |
| | | | | | AI560012, AI568854, AI620284, |
| | | | | | AI220734, AA938383, AI446606, |
| | | | | | AI312428, AI590128, AL040243, |
| | | | | | AI445432, AI625079, AA528822, |
| | | | | | AI697137, AI857296, AI919058, |
| | | | | | AI540832, AI613017, AI249257, |
| | | | | | AI702433, AW148320, AI800453, |
| | | | | | AI800433, AI609580, AI866780, |
| | | | | | AI499463, AL038778, AI610307, |
| | | | | | AI758437, AI597750, AI633419, |
| | | | | | AI866002, AI684265, AA603930, |
| | | | | | AL043326, AW074869, AI224992, |
| | | | | | AL048871, AI687362, AI434281, |
| | | | | | AI281773, AI680113, AI344182, |
| | | | | | AI952114, AI874109, AI862142, |
| | | | | | AI440239, AI271786, AI499131, |
| | | | | | AL038779, AI682841, AI269696, |
| | | | | | AI307558, AL042538, AL036247, |
| | | | | | AI348897, AI475134, AI610645, |
| | | | | | AI682106, AI889839, AI866887, |
| | | | | | AW301300, AI628205, AI800411, |
| | | | | | AI539771, AI500659, AI469811, |
| | | | | | AI754897, AI064787, AI569616, |
| | | | | | AI281762, AI624668, AI580984, |
| | | | | | AA508692, AA528529, AI570384, |
| | | | | | AW075351, AW167776, AI802542, |
| | | | | | AW026882, AL036260, AI907056, |
| | | | | | AL047041, AI921379, AI610756, |
| | | | | | AI886532, AI818206, AI811863, |
| | | | | | AI334902, AI492540, AI445025, |
| | | | | | AL044207, AI636445, AW104724, |
| | | | | | AI439745, AW002342, AI888953, |
| | | | | | AI687375, AI282281, AI620868, |
| | | | | | AL036361, AI493248, AI340603, |
| | | | | | AW085799, AI349226, AW118557, |
| | | | | | AI804585, AI609331, AW268768, |
| | | | | | AI283941, AC005045, AF073770, |
| | | | | | AF168793, U65745, I48979, AF118064, |
| | | | | | AL049430, Y11587, S78214, AL133640, |
| | | | | | AF090934, AL050393, AL133016, |
| | | | | | AF113013, AF078844, AF118070, A93016, |
| | | | | | AF113691, AF090900, AF125949, |
| | | | | | AL050146, AF090901, AF090943, L31396, |
| | | | | | L31397, AJ242859, AL080060, AL110196, |
| | | | | | AF113676, AL133606, AL049938, |
| | | | | | AF104032, AF090903, AL117460, |
| | | | | | AL117457, AL049452, AF113689, |
| | | | | | AL110221, AR059958, AF113694, |
| | | | | | AL137527, I89947, AC002467, A08916, |
| | | | | | S68736, AF091512, AF113690, I89931, |
| | | | | | U95739, AC006371, AL122050, |
| | | | | | AL050149, AF090896, AF106862, |
| | | | | | AC007298, X84990, AL050108, U42766, |
| | | | | | AL096744, AB019565, AC004987, |
| | | | | | AL133075, AL050116, A08913, |
| | | | | | AL049314, AL096776, AL050277, |
| | | | | | AL122093, AF113677, AC005015, |
| | | | | | AF113019, Y16645, AC004690, |
| | | | | | AL049466, AC006336, I48978, AC005242, |
| | | | | | AF113699, AF017152, AL080137, S61953, |
| | | | | | AC006115, AC006944, AF042090, |
| | | | | | AC008394, AL133557, AC005886, |
| | | | | | AC007151, AR011880, E03348, |
| | | | | | AL137283, AL133093, AC005291, |
| | | | | | X63574, AL022147, AC007390, |
| | | | | | AL035587, AL049776, AC004520, |
| | | | | | AL080124, AL133080, AL022315, |
| | | | | | AL137557, AC006480, AC005520, |
| | | | | | AC010072, AF158248, AC005488, |
| | | | | | AL117394, AL034451, AL121934, |
| | | | | | Y11254, AL137459, AL133565, |
| | | | | | AC004686, AC004491, AL031283, |
| | | | | | AF162270, AF097996, AP000013, |
| | | | | | AL030999, U91329, AL122121, AF146568, |
| | | | | | AC004883, AC005175, Z98036, AJ000937, |
| | | | | | Z82206, AC006840, AC004383, |
| | | | | | AL122123, E07361, AF111851, AC007676, |
| | | | | | AP000201, AC009233, AF003737, U66059, |
| | | | | | AC002504, AF196779, AL109827, Z68164, |
| | | | | | AL050138, AF091084, AP000097, |
| | | | | | AL035067, AL033521, AL078593, |
| | | | | | AL008735, AC005048, AL110225, |
| | | | | | AC006157, AF079765, AP000240, and |
| | | | | | X82434. |
| HARAB87 | 45 | 1164340 | 1-536 | 15-550 | AI733761, AA121199, AA296916, |
| | | | | | AI770025, AI733898, AA366952, |
| | | | | | AA149362, AI288862, AC005669, S76742, |
| | | | | | I26666, and AF075261. |
| HTNGF69 | 46 | 1152268 | 1-824 | 15-838 | AI139022, AA552953, AI204346, |
| | | | | | AI741884, AI042245, AW205544, |
| | | | | | AI017548, AA258321, AI571085, |
| | | | | | AA478401, AA258530, AA701456, |
| | | | | | AA454012, AA402279, AA873796, |
| | | | | | Z41600, AA688162, AI799203, and |
| | | | | | C00673. |
| HMSJL96 | 47 | 1154788 | 1-1898 | 15-1912 | U69566, AI478738, AI700975, AW270625, |
| | | | | | AA558431, AI955662, AI796542, |
| | | | | | AA620937, AW073767, AA928103, |
| | | | | | AI087266, AI949116, AI273460, |
| | | | | | AI766325, AW297573, AA873139, |
| | | | | | AI350929, AA770419, AA954532, N64139, |
| | | | | | R75698, N87915, R01072, H26525, |
| | | | | | R01798, AA773665, AI003807, AA318420, |
| | | | | | and AA318524. |
| HDTBT06 | 48 | 1205261 | 1-1434 | 15-1448 | AA443164, AW020571, AA532437, |
| | | | | | AW118680, AI890631, AI167234, |
| | | | | | AA744921, AI401545, AW152040, |
| | | | | | AW074628, H06431, R74385, AA862392, |
| | | | | | AA649701, AA160546, AI880570, D62917, |
| | | | | | H23246, H46816, AA973615, AI819867, |
| | | | | | H00507, R21742, AA463453, C05953, |
| | | | | | R25958, R26764, AA639080, AW195349, |
| | | | | | AA315526, AW362722, AI494615, |
| | | | | | AW070869, H71752, T84284, AA767232, |
| | | | | | AI824357, and AF161399. |
| HTTIE47 | 49 | 1165363 | 1-878 | 15-892 | R29204, W60551, and AC004386. |
| HHFBP47 | 50 | 946668 | 1-1193 | 15-1207 | AW341717, AA001259, AA778598, |
| | | | | | AA203115, AI632467, AA707336, H69425, |
| | | | | | H68732, AI992354, AA346824, AI541205, |
| | | | | | AI557731, AI525500, AI557533, |
| | | | | | AI525556, AI557262, AI541321, |
| | | | | | AI557082, H65400, AI557238, AI557602, |
| | | | | | T18597, AI540890, AW021281, AI541056, |
| | | | | | AI557258, AI541048, AI525856, |
| | | | | | AI557084, AI535660, AI525656, D50992, |
| | | | | | Z32887, AW021585, AI526078, Z33559, |
| | | | | | AI557234, D59751, AI535639, AW023235, |
| | | | | | AI525757, AW022727, AL050350, |
| | | | | | AC002464, AR050070, S68736, A62298, |
| | | | | | A82595, A82593, Z30183, U94592, |
| | | | | | Y08991, A62300, AF006072, U45328, and |
| | | | | | AR025466. |
| HCCCC81 | 51 | 1083553 | 1-710 | 15-724 | W16450, AL042537, AA367722, |
| | | | | | AI436552, and AA236375. |
| HPJEV71 | 52 | 1197841 | 1-1830 | 15-1844 | AW239092, AA174017, AA303007, |
| | | | | | AL038072, AW103758, AI923333, |
| | | | | | AA576336, AA704393, AI654285, |
| | | | | | AI859946, AI888468, AA837778, |
| | | | | | AI254913, AW089101, AA584145, |
| | | | | | AA468131, F08230, AA302973, |
| | | | | | AA847952, AI620992, AI923126, |
| | | | | | AI800168, AI278972, AI207465, |
| | | | | | AW023149, H06140, AI751216, AI800180, |
| | | | | | AW131208, AI824706, AW440545, |
| | | | | | AP001037, AC006211, AL080243, |
| | | | | | AL121892, AP000525, AC006480, |
| | | | | | AC006288, AL031321, AL008731, |
| | | | | | AC004466, AC005870, AC008134, |
| | | | | | AC000353, AL117352, AC003049, |
| | | | | | AC007227, AF008191, AC004836, |
| | | | | | AC005041, AC005209, Z98941, |
| | | | | | AL049690, AC005952, AC007216, |
| | | | | | AL034417, AC004851, X05151, |
| | | | | | AC005480, AC006080, AL049830, |
| | | | | | AC004837, U95742, AC003684, |
| | | | | | AC005324, AC005529, AF059650, |
| | | | | | AF050154, Z85987, AL008638, AC005886, |
| | | | | | AL049636, AC007114, AC005368, |
| | | | | | AC007056, AC012099, Z97989, |
| | | | | | AL133249, AP000555, AC007386, |
| | | | | | AC004924, AC005728, AC006946, |
| | | | | | AL133246, AL022323, AC006961, |
| | | | | | AL022302, Z99755, AL031427, Z81014, |
| | | | | | AC002350, AL021918, Z97876, AL035417, |
| | | | | | AC005484, AP000228, Z98750, AC003670, |
| | | | | | AP001054, AL035555, Z83826, AL078463, |
| | | | | | U95743, AC004882, AC004622, |
| | | | | | AL024494, Z69707, U95090, AC006133, |
| | | | | | AL032821, AC007738, AL022238, Z71182, |
| | | | | | AC005920, AL034423, X12919, |
| | | | | | AC004475, AC000066, AC002126, |
| | | | | | AC007011, AC002996, AP000140, |
| | | | | | AF157623, AC005318, AL035659, |
| | | | | | AC002980, AC007537, AC016027, |
| | | | | | AC016830, AL133244, Z82206, |
| | | | | | AC005514, AL096775, AF070718, |
| | | | | | AC004905, AP000035, AC004696, |
| | | | | | AP000350, Z97054, AC005089, AC005587, |
| | | | | | AL031575, AL031281, Z82214, AC006230, |
| | | | | | AC006064, AC001644, AP000466, |
| | | | | | AP000088, AC002325, L29252, AC000082, |
| | | | | | Z73965, AL031767, AC002553, and |
| | | | | | AC007312. |
| HTEIL07 | 53 | 1136121 | 1-1216 | 15-1230 | AA725842, AW139921, AI651885, |
| | | | | | AI971598, AA453466, AL110422, |
| | | | | | AI027229, AI026797, AA778573, |
| | | | | | AI279962, AI073425, AI208767, H55405, |
| | | | | | AA453966, H55431, AL118498, and |
| | | | | | AL031843. |
| HTEAG49 | 54 | 954614 | 1-1289 | 15-1303 | AW452652, AI039005, AA780077, |
| | | | | | AW316890, AI337290, AA463229, |
| | | | | | AA463230, AI423317, AI468158, |
| | | | | | AA382497, N66986, AF041822, |
| | | | | | AL390796, AL390796, AL357045, and |
| | | | | | AL357045. |
| HSLCF96 | 55 | 637670 | 1-1575 | 15-1589 | |
| HNHCI32 | 56 | 861673 | 1-586 | 15-600 | AF112462, and AR035954. |
| HPMFL08 | 57 | 1050684 | 1-463 | 15-477 | AA555286, AA640814, AI281916, |
| | | | | | AW073979, AI378363, R70468, |
| | | | | | AW242350, AW013856, AA644290, |
| | | | | | AW449140, Z93016, AC012384, |
| | | | | | AL035541, AC005228, AC003662, and |
| | | | | | AC009300. |
| HTXRA13 | 58 | 959622 | 1-1150 | 15-1164 | AI701008, N92159, AA363885, AI990716, |
| | | | | | AW197467, and AW291923. |
| HCE3H71 | 59 | 1197898 | 1-2059 | 15-2073 | AI638508, AW139057, AW149807, |
| | | | | | AI654790, AI419465, AI569283, H51217, |
| | | | | | R90888, R85125, H29245, H29244, |
| | | | | | AA488106, AI480182, H05353, AI500178, |
| | | | | | AI873131, AI499775, F11386, H05303, |
| | | | | | AI458144, H51247, F05862, R44423, |
| | | | | | F09051, R14779, R51725, R51648, |
| | | | | | R42549, AA338672, Z40525, F07470, |
| | | | | | R19635, W22746, R49451, R35934, |
| | | | | | R85080, F02105, AW169213, AL046466, |
| | | | | | AW162194, AI352326, AI700159, |
| | | | | | AI955945, AW192701, AI890507, |
| | | | | | AI978703, AI263331, AI800159, |
| | | | | | AI573167, AI571980, AI961589, |
| | | | | | AW169671, AW188693, AI634224, |
| | | | | | AI274507, AI690748, AI758309, |
| | | | | | AI648436, AL039716, AI590043, |
| | | | | | AI911648, AI690687, AW075484, |
| | | | | | AI917963, AI648684, AI698391, |
| | | | | | AI671642, AI619607, AW168031, |
| | | | | | AW168296, AI572787, AI918435, |
| | | | | | AL119863, AI564426, AI814087, |
| | | | | | AI470648, AI452556, AW029611, |
| | | | | | AI921254, AW054960, AI365256, |
| | | | | | AI564234, AI597758, AI919500, |
| | | | | | AI624120, AI686716, AI621341, |
| | | | | | AI309306, AL079799, AW071349, |
| | | | | | AW008781, AI926878, AI564448, |
| | | | | | AW024594, AI933992, AI540676, |
| | | | | | AW051088, AW198075, AI921155, |
| | | | | | AI536685, AI561356, AI922812, |
| | | | | | AI538850, AI468872, AW022699, |
| | | | | | AW089275, AI919593, AW188382, |
| | | | | | AI866770, AI434134, AW264019, |
| | | | | | AA835966, AI690620, AI950729, |
| | | | | | AI564765, AI813868, AI925680, |
| | | | | | AI829327, AI417790, AI540759, |
| | | | | | AI630876, AI570872, AI744279, |
| | | | | | AL046595, AI439452, AI566386, |
| | | | | | AI354630, AI609409, AI681985, |
| | | | | | AL040011, AI784219, AI247193, |
| | | | | | AI590781, AW080746, AI874261, |
| | | | | | AI249877, AA279795, AI470284, |
| | | | | | AI589428, AI445611, AI590415, |
| | | | | | AI620284, AI887389, AI554485, |
| | | | | | AI963625, AI522052, AI654672, |
| | | | | | AI520809, AI889306, AI540674, |
| | | | | | AI783821, AI281757, AI474646, |
| | | | | | AI889376, AA983883, AI567769, |
| | | | | | AA916133, AI670009, AI783504, |
| | | | | | AL047675, AI805671, AI366900, |
| | | | | | AW130307, AI289310, AI553645, |
| | | | | | AW022093, AI797538, AW029197, |
| | | | | | AI696570, AI624293, AI345688, |
| | | | | | AI872423, AI362580, AI580674, |
| | | | | | AW087199, AL135517, AW170725, |
| | | | | | AA687501, AI479577, AI868204, |
| | | | | | AI863241, AW194185, AI572021, |
| | | | | | AI492540, AA502794, AW080346, |
| | | | | | AI419650, AI679550, AI632851, |
| | | | | | AI920835, AW188539, AI241923, |
| | | | | | AI587121, AW163823, AI433611, |
| | | | | | AI697157, AI621209, AW008166, |
| | | | | | AI862139, AI612750, AI147686, |
| | | | | | AA806719, AW102902, AI273901, |
| | | | | | AI306613, AI679672, AW152182, |
| | | | | | AI270295, AI422688, AW024793, |
| | | | | | AI288305, AI695129, AI569945, |
| | | | | | AL036673, AI918449, AW088560, |
| | | | | | AI889189, AW148423, AI620075, |
| | | | | | AI357599, AI269205, AW167228, |
| | | | | | AI277325, AL138386, AI439745, |
| | | | | | AW193467, AI590830, AI623941, |
| | | | | | AW117997, AI797908, AI963224, |
| | | | | | AL038665, AI524179, AI818353, |
| | | | | | AW075413, AI954507, AI683099, |
| | | | | | AI524671, AI635478, AI653578, |
| | | | | | AI623379, AI860783, AW007309, |
| | | | | | AI635639, AI564749, AI830259, |
| | | | | | AW029533, AI627360, AI874166, |
| | | | | | AI582932, D29763, D64009, D64010, |
| | | | | | I89947, AL137271, AF067728, AL137665, |
| | | | | | AR038854, AL050155, AL117435, |
| | | | | | AJ003118, AF177401, AJ005690, I48978, |
| | | | | | AF113690, AL137463, AL050277, A65340, |
| | | | | | AL137479, AL133560, S75997, AF028823, |
| | | | | | S36676, AF111849, E01314, AL080126, |
| | | | | | AL110296, Z97214, U75932, AF151109, |
| | | | | | X52128, AL133606, AF106862, A18777, |
| | | | | | AL137459, AL122100, AF061795, |
| | | | | | AF151685, A45787, AL110225, I32738, |
| | | | | | AR034821, A15345, AL080124, |
| | | | | | AL137550, AL117416, AF183393, E02349, |
| | | | | | A08913, AL137574, AL133568, |
| | | | | | AL137480, AL133112, AL137478, |
| | | | | | A08916, U86379, AL133557, M27260, |
| | | | | | A08912, AL110280, A52563, AL133637, |
| | | | | | I89931, X93495, AL110222, A08910, |
| | | | | | X72889, A21103, I49625, AF091084, |
| | | | | | A08909, AJ238278, AL122098, AL117394, |
| | | | | | AL080148, X63574, AF061573, AF113677, |
| | | | | | A08908, AF031147, AL137533, AL137294, |
| | | | | | AL050138, AJ006417, AF026816, I89934, |
| | | | | | AF017437, AL050149, AL133010, U35846, |
| | | | | | E01614, E13364, AL049339, A07588, |
| | | | | | AL133558, Y11254, Y10655, AL122110, |
| | | | | | AR020905, A65341, A77033, A77035, |
| | | | | | AL137641, AL023657, I48979, S78453, |
| | | | | | AL080159, AF087943, Y14314, AL137558, |
| | | | | | AF158248, AF061981, AL133619, |
| | | | | | AL117463, AF079763, U87620, U80742, |
| | | | | | S76508, AL049314, AL080154, AF111851, |
| | | | | | AL110218, A90832, AL117460, AF094480, |
| | | | | | AF090900, U66274, AL133016, A23630, |
| | | | | | I00734, AF113694, L19437, AF090943, |
| | | | | | AF069506, Z82022, AF017152, AF205861, |
| | | | | | E00617, E00717, E00778, AF016271, |
| | | | | | AF100781, AL137292, AL137537, I89944, |
| | | | | | L04849, X82434, X79812, Y11587, |
| | | | | | AF118070, AL122050, AL117583, |
| | | | | | AF159615, AF017790, I17544, AL137529, |
| | | | | | AL110221, AF090903, Y09972, AF026124, |
| | | | | | U42766, AF051325, D83032, AL049464, |
| | | | | | AL137560, AL137530, AL049452, |
| | | | | | U55017, X67688, A18788, E12747, |
| | | | | | X63410, AF113019, AL137523, AF057300, |
| | | | | | AF057299, AL110171, AF118094, |
| | | | | | AL049283, E04233, X80340, AR059958, |
| | | | | | AL080127, AF125948, AF185576, |
| | | | | | AF113691, A58524, A58523, AL137276, |
| | | | | | AL137429, AL137283, X76228, S63521, |
| | | | | | AL133080, X70685, M30514, E06743, |
| | | | | | AJ242859, AL137256, L31396, U68387, |
| | | | | | AL137656, AF146568, AL122093, L31397, |
| | | | | | U91329, AJ012755, M92439, AF003737, |
| | | | | | AL080163, I96214, AR034830, M86826, |
| | | | | | S82852, AF137367, AF115392, AL122106, |
| | | | | | U00763, AF106697, U57352, S68736, |
| | | | | | AL137488, AL133113, A03736, AF032666, |
| | | | | | AF111112, A08907, Y10823, AL049430, |
| | | | | | AL133640, AF118090, M96857, E07108, |
| | | | | | AL117457, D16301, I66342, AL133665, |
| | | | | | AL050092, AL049465, AR011880, |
| | | | | | A08911, and AL133067. |
| HUTSF11 | 60 | 1134914 | 1-437 | 15-451 | AI384010, AI288640, Z20435, and |
| | | | | | A74523. |
| HTEGI48 | 61 | 1021235 | 1-536 | 15-550 | AA102044, H93506, AF140360, and |
| | | | | | AF074606. |
| HSFAM09 | 62 | 1153913 | 1-281 | 15-295 | |
| HNFHK77 | 63 | 1182286 | 1-1272 | 15-1286 | |
| HFXDO83 | 64 | 1012602 | 1-605 | 15-619 | T03269, D58283, D59859, D80022, |
| | | | | | D80166, D80195, D80193, D59927, |
| | | | | | D59467, D51423, D59619, D80210, |
| | | | | | D51799, D80391, D80164, D59275, |
| | | | | | D80240, D80253, D80043, D59787, |
| | | | | | D80227, D59502, C14331, D80038, |
| | | | | | AW177440, AW378532, AW179328, |
| | | | | | AA305409, D80134, C14389, D51097, |
| | | | | | C75259, AW360811, AW366296, |
| | | | | | AW375405, D58253, AA305578, |
| | | | | | AW375406, AW378534, AW179332, |
| | | | | | AW377672, AW179023, AW178905, |
| | | | | | D80132, AW352170, AW377676, |
| | | | | | AW178906, AW177733, AA033512, |
| | | | | | D89785, D34614, X67155, X82626, |
| | | | | | A84916, A67220, A62300, A62298, |
| | | | | | Y17188, A78862, D26022, D88547, |
| | | | | | AJ132110, A25909, AR018138, AB012117, |
| | | | | | AR025207, A85396, A44171, A85477, |
| | | | | | AR066482, A86792, I19525, X93549, |
| | | | | | AF058696, Y12724, AR008278, |
| | | | | | AB028859, D88507, A94995, AF135125, |
| | | | | | U87250, I18367, U87247, AB033111, and |
| | | | | | AR064240. |
| HSDIW73 | 65 | 1104406 | 1-1602 | 15-1616 | |
| HFVGD23 | 66 | 1199645 | 1-1842 | 15-1856 | W78862, W19697, H14921, AA576940, |
| | | | | | H14628, H54580, AW119184, T93838, |
| | | | | | AA056294, R53170, R99389, R11968, |
| | | | | | F11919, F11380, T79980, AA043550, |
| | | | | | T65194, R09850, AI948441, AI206824, |
| | | | | | AW190832, AI199930, R55990, |
| | | | | | AA013266, AI097591, AI754286, |
| | | | | | AF073770, AC005045, AF052187, |
| | | | | | AF168793, U65745, U26033, J02844, and |
| | | | | | Z98742. |
| HMSBZ24 | 67 | 1082367 | 1-706 | 15-720 | H14236. |
| HWHHB69 | 68 | 1217042 | 1-2892 | 15-2906 | AL045925, AL042685, AW245943, |
| | | | | | AW245500, AI827711, AW247149, |
| | | | | | AI589761, AI422317, AI076031, N94372, |
| | | | | | AA708691, AA702609, AA702730, |
| | | | | | AI912816, AI984055, AL042686, |
| | | | | | AI420887, AL045926, AW272712, |
| | | | | | AW237553, AI469477, AA494501, |
| | | | | | AW374634, AI863106, AA181277, |
| | | | | | T15903, AI476561, R06007, AA380280, |
| | | | | | AA322751, C04187, F36452, AW248180, |
| | | | | | AA883148, AI767541, T82100, AA506918, |
| | | | | | AA227226, C01255, N57562, and |
| | | | | | AJ242655. |
| HFXLC69 | 69 | 1162543 | 1-1632 | 15-1646 | AA296887, AA297110, AF065216, |
| | | | | | AF121908, and AF065215. |
| HBXBW40 | 70 | 1156765 | 1-574 | 15-588 | AL023754, AL049688, and D86557. |
| HCE1L51 | 71 | 1140498 | 1-420 | 15-434 | AA349751. |
| HRADM45 | 72 | 1148046 | 1-468 | 15-482 | AA418916, AA426580, AJ271722, |
| | | | | | AP000260, AP000036, AF055919, |
| | | | | | AP000099, and AP000098. |
| HTEFO45 | 73 | 1153918 | 1-899 | 15-913 | AA620907, AA758187, AA015938, |
| | | | | | R84831, AA412093, R58215, and U75361. |
| HOHBN82 | 74 | 1152271 | 1-1453 | 15-1467 | AI335266, AI751901, AI751815, |
| | | | | | AI750604, AI040116, AW067945, |
| | | | | | AW239149, AI572373, N42174, N22119, |
| | | | | | N71503, AF182316, AF182317, AB033033, |
| | | | | | and AR018882. |
| HWHGF52 | 75 | 1217026 | 1-2228 | 15-2242 | AW044636, AI216076, AA846742, |
| | | | | | W22035, AW172841, AI291112, |
| | | | | | AI681233, AW080046, AI399893, H28922, |
| | | | | | AA614450, AA536156, AI278855, N39741, |
| | | | | | AI183847, H21177, AA313439, N20038, |
| | | | | | AA470881, AI088477, AA032036, |
| | | | | | AW007815, AA515917, AA348553, |
| | | | | | R86198, AW006990, AI094006, D61068, |
| | | | | | AI282605, R48136, AA971399, AA333772, |
| | | | | | AA365066, N26782, AA034263, |
| | | | | | AA377509, AA804676, AI242834, R48135, |
| | | | | | AA576728, D60948, D60442, H46369, |
| | | | | | R49863, D81590, AI183862, AA894892, |
| | | | | | AA886813, D53429, AA484583, R49862, |
| | | | | | AA907007, AA339653, AI183749, |
| | | | | | AA348552, AI167561, AI869376, |
| | | | | | AA223889, M78928, AI241882, |
| | | | | | AB002360, and Z35654. |
| HBKDI30 | 76 | 1223861 | 1-1626 | 15-1640 | F37398, AA197072, F22840, AW444680, |
| | | | | | AA196995, F31270, R02824, F37397, |
| | | | | | AA112849, F17211, F37676, F30884, |
| | | | | | F35768, F35763, J05194, and J03886. |
| HSQFR54 | 77 | 1185143 | 1-2012 | 15-2026 | AA811369, AA873372, AA209183, |
| | | | | | AA304836, W26880, AW189673, |
| | | | | | AI459087, AA326319, T11336, H00191, |
| | | | | | AL120282, and U35244. |
| HAGBA56 | 78 | 1102593 | 1-1273 | 15-1287 | AA812064, AI803142, AA430303, |
| | | | | | AA430200, AI425013, AA954361, |
| | | | | | AA012835, T07365, AA984341, AI207984, |
| | | | | | AB020641, AF033655, U62391, |
| | | | | | AC000057, AC006036, and AC002458. |
| HHSAE29 | 79 | 1220851 | 1-1193 | 15-1207 | |
| HMSHO64 | 80 | 746582 | 1-398 | 15-412 | |
| HFPBW22 | 81 | 1154786 | 1-1051 | 15-1065 | AA583561, AI685755, and AI971263. |
| HTLBH67 | 82 | 1224371 | 1-2872 | 15-2886 | AI700778, AI651596, AA203283, |
| | | | | | AI079116, AI269328, AA766256, |
| | | | | | AA846207, W94671, W95139, AI765522, |
| | | | | | AI123765, AW337193, AI693824, T15539, |
| | | | | | AI269741, W19592, AW449541, |
| | | | | | AW407143, AA045079, AI204381, |
| | | | | | AA045395, AW305104, AI742830, |
| | | | | | AW052085, AI858504, AI587476, |
| | | | | | AW135172, AI887064, AW380082, |
| | | | | | AW295490, AI453541, AI955603, |
| | | | | | AA971802, AA485799, AA287153, |
| | | | | | AI761438, AA485669, AA781274, |
| | | | | | AA214554, AI865011, AA284733, |
| | | | | | AW341388, AA814271, AA447822, |
| | | | | | AA256234, AA368228, AC005368, |
| | | | | | AF086518, and AF059650. |
| HNTMH70 | 83 | 1143523 | 1-1073 | 15-1087 | AL045099, AL110384, AA477597, |
| | | | | | AA485587, R25821, AL134410, R55476, |
| | | | | | AA584162, H19102, AI383263, AA349309, |
| | | | | | H42360, AA953198, AI688425, W22471, |
| | | | | | AI537054, AA736967, R56322, AA526482, |
| | | | | | H29361, AI699883, F06802, Z78292, |
| | | | | | AA081493, AW168512, AA035215, |
| | | | | | AA078393, AA077854, H21589, AI004027, |
| | | | | | AA836778, D44975, AA581900, R17223, |
| | | | | | H18689, AA507183, AI570959, AL134844, |
| | | | | | R87452, AA569527, AA491053, |
| | | | | | AA077436, R28228, R49752, F00981, |
| | | | | | W38765, AA584770, AA601420, |
| | | | | | AA374571, R87607, AA601480, |
| | | | | | AA310271, R26668, R11721, AW298136, |
| | | | | | AA780824, F12062, AA164247, |
| | | | | | AA062928, AI539135, AI752143, T66331, |
| | | | | | AA868891, AI298079, AA582543, |
| | | | | | AC005726, AC005785, AF196970, |
| | | | | | AL034374, AL049822, Y18000, |
| | | | | | AC005529, AC005288, AC002553, |
| | | | | | AC002395, AF052041, AP000087, |
| | | | | | AL049594, AC015853, AC007999, |
| | | | | | AL049839, AC005531, AC008038, |
| | | | | | AF095725, AC002351, AL034394, |
| | | | | | AC005694, AC004860, AC005343, |
| | | | | | Z98304, AL031650, AL109847, AL021938, |
| | | | | | AP000225, AC002524, AC007372, |
| | | | | | AL050321, AP000555, AC005829, |
| | | | | | AC003663, AL035681, AP000350, |
| | | | | | AL049837, AL118497, AC005013, Z98742, |
| | | | | | AL031685, AC003991, AC006449, |
| | | | | | AB000882, AL031057, U91326, |
| | | | | | AL024507, AC002544, AL109662, |
| | | | | | AC005206, AC006992, AL049632, |
| | | | | | AL133245, AL109837, AC005667, |
| | | | | | AP000506, AL080233, AL117356, |
| | | | | | AC007376, AB014080, AL021154, |
| | | | | | AC004814, AL121653, AC004206, |
| | | | | | AC006236, AL034430, AL121756, |
| | | | | | AL049757, AC004757, AL049552, |
| | | | | | AC004073, AC006557, AL117258, |
| | | | | | AP000514, AL031671, AC004167, |
| | | | | | AJ011930, AC004849, AB000879, |
| | | | | | AL021397, AL049539, AC005535, |
| | | | | | AC004079, AL031668, AL031430, |
| | | | | | AC005971, AC004558, Z69654, |
| | | | | | AL080112, AL096773, AC005681, |
| | | | | | AF165147, AC005006, AP000502, |
| | | | | | AC002525, AC005962, Z83840, |
| | | | | | AC004448, AC007172, AC008372, |
| | | | | | AL031602, Z82976, AL035045, AF129077, |
| | | | | | Z97054, AC007560, AC004021, |
| | | | | | AL121577, AC003005, Z94054, AL023575, |
| | | | | | AC002531, AC005156, AC004196, |
| | | | | | Z94044, AL033527, AF165926, AP000520, |
| | | | | | L09706, AC008249, AC004474, AF029308, |
| | | | | | Z75746, AC006132, Z73900, AC005046, |
| | | | | | AB023056, AF019413, AC007327, |
| | | | | | AF064859, AC005069, AC007126, Z11739, |
| | | | | | AP000510, AL133246, AL021394, |
| | | | | | AC004520, AC002556, AC007066, |
| | | | | | AC003071, AP000553, AC005684, Z11740, |
| | | | | | Z98172, AB023048, AC009516, Z95437, |
| | | | | | AC004065, AC007546, AC004973, |
| | | | | | AL031224, AC006427, AL049842, |
| | | | | | AL022101, AL035078, AC005332, Z83844, |
| | | | | | AC003102, AC004169, AP000694, |
| | | | | | AC004601, AC008417, AC006313, |
| | | | | | AC007967, AL049832, Z83841, |
| | | | | | AC005510, AC004462, AP000501, |
| | | | | | AL133304, AC007387, Z84487, AL096703, |
| | | | | | AC002463, AC004213, AL133243, |
| | | | | | AC004762, AL137191, AC006539, |
| | | | | | AL022476, D10855, AP000354, AL022723, |
| | | | | | AL031391, AC002991, L77570, Z82203, |
| | | | | | AC005067, AC004067, AL022170, |
| | | | | | AC005320, AC005527, AC002400, |
| | | | | | Z75889, AL023875, AC007666, AL135745, |
| | | | | | AC000052, AD000813, AC004144, |
| | | | | | AF187850, AC004019, AC005940, |
| | | | | | AL031229, AF109076, AL049646, |
| | | | | | AC007435, Z82171, AC005570, |
| | | | | | AC004531, AC000025, AL050343, |
| | | | | | AF107885, AC005828, Z82196, AL022332, |
| | | | | | Z93403, AF117829, AL031275, AL021877, |
| | | | | | AC006077, Z98941, AC004858, |
| | | | | | AC000387, AC006222, AC006952, |
| | | | | | AC006001, AL022721, AC004885, |
| | | | | | AL035458, AP000352, AC002402, |
| | | | | | AF109907, AC000003, AC007687, Z97056, |
| | | | | | AC005192, AC005994, AL109802, |
| | | | | | AL008583, AL022400, AL049843, |
| | | | | | AL079342, AC002996, AP001053, |
| | | | | | AC006039, AC005317, AC006008, and |
| | | | | | AL135879. |
| HCETC59 | 84 | 1183334 | 1-401 | 15-415 | AA346622, AA085022, and U35245. |
| HE8UX76 | 85 | 1161223 | 1-1763 | 15-1777 | AI863338, AA703679, AI223268, F12220, |
| | | | | | F09849, R22646, H04918, H04815, |
| | | | | | T66347, AB026810, AB026803, |
| | | | | | AB026809, U20105, and Y19241. |
| HTLEN77 | 86 | 1136124 | 1-1180 | 15-1194 | T89857, T89583, AI349772, AL121365, |
| | | | | | AL047042, AL036396, AL121270, |
| | | | | | AI687376, AL119791, AW238730, |
| | | | | | AW268253, AI636456, AI349004, |
| | | | | | AI868831, AL045500, AI521012, |
| | | | | | AI285735, AW301409, AL135661, |
| | | | | | AL038778, AW103371, AL036802, |
| | | | | | AL047763, AI433976, AI475371, |
| | | | | | AW071349, AI436456, AL036146, |
| | | | | | AI687728, AI064830, AI349645, |
| | | | | | AI445432, AI635461, AI625079, |
| | | | | | AI250293, AI568870, AI702406, |
| | | | | | AI538716, AW195957, AI439087, |
| | | | | | AW162071, AI678302, AI564719, |
| | | | | | AL119049, AI815383, AI620284, |
| | | | | | AI498579, AI433157, AW169653, |
| | | | | | AI340582, AI349933, AI613017, |
| | | | | | AL045903, AL046849, AI866608, |
| | | | | | AL036274, AL040243, AW274192, |
| | | | | | AI590128, AI699857, AW071417, |
| | | | | | AI540832, AI440426, AI697137, |
| | | | | | AI249257, AI275175, AI281779, |
| | | | | | AI857296, AI702433, AW148320, |
| | | | | | AI800453, AI800433, AL038605, |
| | | | | | AI500553, AI920968, AI500077, |
| | | | | | AI580190, AI567351, AW074993, |
| | | | | | AI439745, AI312152, AI345735, |
| | | | | | AI349937, AW089572, AI207510, |
| | | | | | AI906328, AI690751, AW068845, |
| | | | | | AI758437, AI597750, AI499463, |
| | | | | | AI682743, AL120854, AW166645, |
| | | | | | AI497733, AI673256, AI679724, |
| | | | | | AI633419, AI866002, AI863014, |
| | | | | | AI349614, AI499131, AW080838, |
| | | | | | AI686926, AW117882, AL043326, |
| | | | | | AI440239, AI873731, AI567632, |
| | | | | | AW303152, AI282655, AI281773, |
| | | | | | AI610307, AI907070, AI631107, |
| | | | | | AI568855, AI818683, AI499393, |
| | | | | | AI224992, AL036759, AL038779, |
| | | | | | AI343112, AI866887, AA613907, |
| | | | | | AW074869, AI349598, AL120736, |
| | | | | | AI349256, AI608667, AI866780, |
| | | | | | AL048871, AW087445, AI348897, |
| | | | | | AL040169, AI682841, AI271786 |
| | | | | | AA572758, AI560012, AI800411, |
| | | | | | AA640779, AI628205, AI597918, |
| | | | | | AI921379, AI690835, AI469532, |
| | | | | | AI568854, AI434281, AW132121, |
| | | | | | AI969601, AI580984, AI366549, |
| | | | | | AI251485, AL036980, AI475134, |
| | | | | | AW268768, AI813914, AI281762, |
| | | | | | AL119748, AW085799, AI811863, |
| | | | | | AI469811, AI862142, AI680113, |
| | | | | | AI889203, AI874109, AI493248, |
| | | | | | AI802542, AW301300, AI687465, |
| | | | | | AW026882, AI934036, AI269696, |
| | | | | | AI889839, AI609592, AI583316, |
| | | | | | AI492540, AI671679, AI570384, |
| | | | | | AA528822, AW167776, AI753683, |
| | | | | | AI610645, AI696398, AW235035, |
| | | | | | AL042753, AI539771, AI969567, |
| | | | | | AI919058, AI500659, AA508692, |
| | | | | | AI445025, AL044207, AI349226, |
| | | | | | AI687375, AW104724, AI591311, |
| | | | | | AI624668, AI754897, AI569616, |
| | | | | | AL121014, AI684265, AI687415, |
| | | | | | AI818206, AI952114, AI149592, |
| | | | | | AI536685, AI872711, AL047041, |
| | | | | | AI318569, AW075351, AI620868, |
| | | | | | AI909666, AI612913, AW118557, |
| | | | | | AI859733, AI609580, AI345860, |
| | | | | | AA585422, AI609331, AI446628, |
| | | | | | AW183130, AI696846, AI343059, |
| | | | | | AI635942, AI432969, AI432229, |
| | | | | | AI690426, AI679764, AI345744, |
| | | | | | AI624859, AI636445, AI334902, |
| | | | | | AI340519, AW302992, AW002342, |
| | | | | | AI619502, AI446606, AA938383, |
| | | | | | AI282281, AI907061, AL119828, |
| | | | | | AI269205, AL036240, AI282903, |
| | | | | | AI800384, AI583445, AI366991, |
| | | | | | AI804585, AI309401, AL041573, I48979, |
| | | | | | AL050393, AF090900, L31396, L31397, |
| | | | | | AF125949, S78214, AF090934, I89947, |
| | | | | | AF113013, AF118070, AF078844, |
| | | | | | AL080060, Y11587, AF090901, AF118064, |
| | | | | | AF113694, AL133016, AF113691, |
| | | | | | AL133640, A93016, AF090943, AL117457, |
| | | | | | AL133606, AF104032, AR059958, |
| | | | | | AL117460, AF090903, AL050146, |
| | | | | | AL137527, AF113689, AL110196, |
| | | | | | AF113690, AL049938, AL049452, |
| | | | | | AL050149, AL110221, S68736, AJ242859, |
| | | | | | AL122050, AB019565, AF090896, I89931, |
| | | | | | AF113676, X84990, AL050108, U42766, |
| | | | | | A08916, AF106862, AL133075, AL050116, |
| | | | | | AF113677, AL049314, AL122093, |
| | | | | | AF113019, AL049466, AL133557, |
| | | | | | AL096744, A08913, AF017152, AL137283, |
| | | | | | AL122121, AL080124, AL080137, |
| | | | | | AL050277, AL133565, E03348, AL137557, |
| | | | | | AL133093, I48978, AF158248, AF113699, |
| | | | | | AL137459, Y16645, Y11254, AJ000937, |
| | | | | | AR011880, AL133080, X63574, |
| | | | | | AF177401, AF111851, E07361, AL049430, |
| | | | | | AL122123, U91329, X82434, AF091084, |
| | | | | | AL050138, AF125948, AF146568, |
| | | | | | AF097996, AL117394, AL110225, E07108, |
| | | | | | AF079765, AL049300, AL137550, I49625, |
| | | | | | AL117583, U00763, AL133560, A65341, |
| | | | | | S61953, AF017437, AL117585, X70685, |
| | | | | | E02349, AJ238278, A08910, AL050024, |
| | | | | | AL117435, AL049464, A08912, |
| | | | | | AL049382, AF067728, AF118094, I33392, |
| | | | | | A58524, A58523, AL133113, AL137538, |
| | | | | | AC007390, AF183393, U72620, A77033, |
| | | | | | A77035, Z82022, E05822, A08909, |
| | | | | | AL122110, AL137271, AL122098, |
| | | | | | A03736, AF091512, AC002467, A12297, |
| | | | | | AL049283, X72889, AL137648, |
| | | | | | AL137463, AF061943, U80742, I03321, |
| | | | | | AF087943, Y09972, I09360, X96540, |
| | | | | | I42402, AL080127, X93495, AL110197, |
| | | | | | AL096776, X57961, U35846, X65873, |
| | | | | | AL080159, U67958, I00734, AL137521, |
| | | | | | AC006336, E00617, E00717, E00778, |
| | | | | | AC006371, AF111112, AL110280, |
| | | | | | X98834, U49908, AC004093, AJ012755, |
| | | | | | AL133014, AL133104, I26207, AR013797, |
| | | | | | AC007172, AL022147, AL133568, |
| | | | | | A93350, E08263, E08264, I17767, |
| | | | | | AC004686, AL133072, AC006840, |
| | | | | | AC004690, L13297, I66342, AL137523, |
| | | | | | AL137560, E15569, AR000496, U39656, |
| | | | | | U58996, AF026816, Y14314, AC007298, |
| | | | | | AL137533, X83508, AC004987, |
| | | | | | AF153205, AF061981, Z37987, AL133077, |
| | | | | | AL137476, AF119337, AL137556, |
| | | | | | AF100931, A08911, AL122049, AL137526, |
| | | | | | Z72491, M30514, U95739, AL133445, |
| | | | | | AF000145, AF057300, AF057299, A45787, |
| | | | | | AL050172, AF026124, and AC004200. |
| HBGDI80 | 87 | 1124695 | 1-1069 | 15-1083 | AI950010, AW014786, AI694670, |
| | | | | | AA171820, AI862334, AA604593, |
| | | | | | AA171724, AI697768, T11223, R41784, |
| | | | | | AI023823, T10688, and AI802300. |
| HELHB88 | 88 | 1225632 | 1-3305 | 15-3319 | AI671143, AI580905, AI632369, |
| | | | | | AA773823, AW370310, AA773263, |
| | | | | | AA313515, AA985166, AL121153, |
| | | | | | AI382884, AA181724, AI469456, |
| | | | | | AA024936, AI750406, AAI55593, |
| | | | | | AA024853, AL120063, T78993, T78788, |
| | | | | | T82245, AA155607, AI750407, AL134372, |
| | | | | | AA670080, L25219, AA247838, |
| | | | | | AF114487, AF114488, AF064243, |
| | | | | | AF064244, U61166, AF127798, AF132672, |
| | | | | | AF132478, AF132481, AP000311, |
| | | | | | AP000117, AP000193, AP000049, |
| | | | | | AP000116, AP000050, AP000048, |
| | | | | | AP000308, and AP000115. |
| HTEMV66 | 89 | 1152261 | 1-847 | 15-861 | AI149647, AA430041, AA430250, and |
| | | | | | AW372558. |
| HMTAJ73 | 90 | 1063989 | 1-954 | 15-968 | AI831613, AI870169, AI924408, |
| | | | | | AI368905, AI284115, AW168626, |
| | | | | | AA678670, AW068406, AA568895, |
| | | | | | AW198110, AA627558, AA857431, |
| | | | | | AW068493, AI284116, H19069, AJ010119, |
| | | | | | AF074714, and AF074715. |
| HE9TD31 | 91 | 815845 | 1-941 | 15-955 | AI475682, AI439613, AA815076, |
| | | | | | AB033082, AF132480, and AF132479. |
| HGBDG55 | 92 | 1141363 | 1-521 | 15-535 | AA368408, and AW614226. |
| HOUHL51 | 93 | 1125914 | 1-633 | 15-647 | AA431822, AI341790, AW295199, |
| | | | | | AI656610, AW292290, AA037543, |
| | | | | | AA431419, AA974280, AA815270, |
| | | | | | AA037457, AI651702, AA583011, |
| | | | | | AI208605, AI419858, AA620408, |
| | | | | | AA417333, AA417321, W28051, |
| | | | | | AA251183, AI917695, W28536, and |
| | | | | | AI024754. |
| HEOPP67 | 94 | 1020119 | 1-959 | 15-973 | AA641653, AF181972, AF181973, and |
| | | | | | AL137592. |
| HKAOV71 | 95 | 1165423 | 1-743 | 15-757 | AF123303, and AF004161. |
| HDQID90 | 96 | 1137752 | 1-1007 | 15-1021 | AW300598, AA669095, AI948608, |
| | | | | | AI797687, AI718165, AI129358, |
| | | | | | AI765613, AA114888, AA504203, |
| | | | | | AI701050, AI890342, AA974370, |
| | | | | | AI023212, AA504439, AI935316, |
| | | | | | AA252310, AA464174, D57415, |
| | | | | | AA280044, W46279, D54675, AA165321, |
| | | | | | AI420451, T71333, N69756, AA832206, |
| | | | | | AA521314, AA114887, AA877638, |
| | | | | | AW196653, AI027401, AI807828, |
| | | | | | AA863081, AA995204, AI831132, Z28882, |
| | | | | | Z40146, D57019, AA464762, Z25261, |
| | | | | | N87679, Z19443, AI918466, T71487, |
| | | | | | F00129, D56990, AL047889, AA278335, |
| | | | | | AW369458, W46278, AA743770, |
| | | | | | AL047888, AI809238, AA767219, |
| | | | | | AW025464, AL110306, AW302960, |
| | | | | | AW162194, AL036802, AW087445, |
| | | | | | AW071417, AI699865, AW163823, |
| | | | | | AL036274, AL041562, AI254727, |
| | | | | | AL119863, AW238730, AL045500, |
| | | | | | AI783861, AI909697, AI340603, |
| | | | | | AI537677, AI433157, AW163554, |
| | | | | | AI698391, AI929108, AI619502, |
| | | | | | AI802542, AW026882, AI783504, |
| | | | | | AI620284, AW198075, AI860783, |
| | | | | | AL079963, AA640779, AL047344, |
| | | | | | AW051088, AA572758, AL041772, |
| | | | | | AI699011, AI345180, AW082113, |
| | | | | | AW269098, AW268251, AI064830, |
| | | | | | AW161156, AL039086, AW020693, |
| | | | | | AI349645, AW268768, AW300782, |
| | | | | | AI349933, AL036403, AL119828, |
| | | | | | AI923989, AW300889, AL119791, |
| | | | | | AI497733, R36271, AL036396, |
| | | | | | AW172745, AI521012, AL041150, |
| | | | | | AW150578, AL079960, AI340519, |
| | | | | | AL048656, AL135022, AL080046, |
| | | | | | AI610293, AI567351, AW162071, |
| | | | | | AW079572, AW169653, AW074993, |
| | | | | | AI636456, AI284517, AI433976, |
| | | | | | AI697324, AW160916, AW268253, |
| | | | | | AI569583, AL038505, AL040169, |
| | | | | | AI312152, AW301409, AI345735, |
| | | | | | AI468872, AI524671, AI349937, |
| | | | | | AL036638, AA613907, AW089572, |
| | | | | | AI863382, AL047042, AW080402, |
| | | | | | AI270183, AI884318, AL037030, |
| | | | | | AI926878, AW023859, AI890507, |
| | | | | | AI564719, AI568114, AW068845, |
| | | | | | AI815232, AI868931, AW020419, |
| | | | | | AI624293, AI683395, AL039716, |
| | | | | | AI499285, AI886753, AL037582, |
| | | | | | AL037602, AL037463, AI815855, |
| | | | | | AI933589, AW004886, AW161579, |
| | | | | | AI312428, AI538850, AI307604, |
| | | | | | AI702073, AA427700, AI873644, |
| | | | | | AL046931, AW059828, AI499963, |
| | | | | | AI866469, AI610645, AL037454, |
| | | | | | AI349614, AL038605, AI343112, |
| | | | | | AL080045, Z99428, AW129106, |
| | | | | | AL134830, AI348897, AI862144, |
| | | | | | AL040827, AL121014, AI349598, |
| | | | | | AW118518, AI560012, AI473536, |
| | | | | | AI633125, AI307285, AI539153, |
| | | | | | AI627988, AI309401, AI567582, |
| | | | | | AI539771, AI500523, AI335208, |
| | | | | | AI866608, AI537244, AL036146, |
| | | | | | AL119049, AI521560, AI889189, |
| | | | | | AA449768, AI340582, AI500659, |
| | | | | | AI269862, AI287449, AI625464, |
| | | | | | AL121365, AI801325, AA804740, |
| | | | | | AW103371, AW022808, AI358701, |
| | | | | | AI613038, AI859991, AI538980, |
| | | | | | AI754897, AA580663, AI813914, |
| | | | | | AW078839, AA528822, AI866770, |
| | | | | | AI500662, AI917963, AL040241, |
| | | | | | AI349004, AI570807, AI352274, F27788, |
| | | | | | AL046944, AL043975, AI570966, |
| | | | | | AI635492, AL042745, AI682841, |
| | | | | | AI475371, AW149236, AI538716, |
| | | | | | AC002350, AB033082, AF132480, |
| | | | | | AF132479, I48979, U35846, I09499, |
| | | | | | I89947, AL122050, I48978, Y16645, |
| | | | | | AL096744, AF090903, AL110196, |
| | | | | | AL117457, Y11587, AF177401, AF090943, |
| | | | | | S78214, AL122093, A08910, AF100931, |
| | | | | | AL133075, AF146568, AL050116, |
| | | | | | AF090901, AL137550, AF090900, A08916, |
| | | | | | I89931, AL133606, AF078844, A77033, |
| | | | | | A77035, AL137271, AL133560, A08909, |
| | | | | | AL049382, AL137538, E07108, AF090934, |
| | | | | | AF183393, AL133565, AL137557, |
| | | | | | AL133640, AL110221, AL133016, |
| | | | | | A08913, E12747, AF113019, AL133557, |
| | | | | | AF113013, AF090896, AR013797, |
| | | | | | AL049452, AF113691, AF079763, |
| | | | | | AL137533, AF104032, AF113694, U87620, |
| | | | | | AF125949, AF097996, AL049938, |
| | | | | | AL137478, AJ000937, AL049283, |
| | | | | | AF125948, AL050146, I00734, S68736, |
| | | | | | AL117435, AB019565, AL049300, E05822, |
| | | | | | AL137459, AL122100, E00617, E00717, |
| | | | | | E00778, AL080124, AF067728, AL050149, |
| | | | | | AL050277, E06743, AL133080, I33392, |
| | | | | | U58996, AL117460, AL137488, |
| | | | | | AL080148, E02221, AF091084, AF113690, |
| | | | | | X70685, E02349, Y11254, AL137480, |
| | | | | | AL049430, AF111851, L31396, AL137527, |
| | | | | | AL050393, AL137548, L31397, AL122121, |
| | | | | | AF118090, M27260, AL050108, U42766, |
| | | | | | A58524, A58523, AR038854, AF017437, |
| | | | | | I49625, AF118064, A65341, AL050024, |
| | | | | | AF118070, AF111849, X63574, X72889, |
| | | | | | AL080060, AF106862, AR059958, |
| | | | | | AL133113, AF079765, AF057300, |
| | | | | | AF057299, AF017152, AF113699, |
| | | | | | AL050172, Z82022, AJ242859, X84990, |
| | | | | | A12297, AL110225, AL137294, AF032666, |
| | | | | | AL137479, A93016, AL122110, |
| | | | | | AL137283, AF118094, A65340, AF158248, |
| | | | | | AR011880, AL133067, AF031147, |
| | | | | | AL122098, AL137529, A03736, |
| | | | | | AL137521, AF067790, AF087943, |
| | | | | | AL049314, AL117649, Z37987, U80742, |
| | | | | | U91329, X83508, U72620, AL049466, |
| | | | | | AF113677, X79812, A08908, AL096720, |
| | | | | | A08912, X82434, AF113689, AJ238278, |
| | | | | | AF113676, AJ005690, AR020905, |
| | | | | | AL117583, U78525, AF126247, AF153205, |
| | | | | | AF026124, U68387, AF081197, AF081195, |
| | | | | | S61953, AF159615, Y09972, AL050366, |
| | | | | | AL117416, A07647, Y07905, AL122123, |
| | | | | | AF210052, AL080158, AL023657, |
| | | | | | AL080137, AL050138, I68732, AF100781, |
| | | | | | AL137526, X87582, AF054599, U96683, |
| | | | | | AL133568, AF185576, AL117394, A21103, |
| | | | | | AL080074, AF106657, AF030513, |
| | | | | | AL137292, AB016226, A18777, |
| | | | | | AL133093, AL080159, Y14314, AF061981, |
| | | | | | AL050155, X65873, AF119337, E03348, |
| | | | | | U67958, AL137560, AF106697, AF139986, |
| | | | | | AL050092, AL049464, X53587, U88966, |
| | | | | | AL080234, AB007812, AL110222, |
| | | | | | X98834, AL137463, X81464, AJ012755, |
| | | | | | AR038969, X80340, U00763, E15569, |
| | | | | | AJ006417, AF026816, E07361, S36676, |
| | | | | | and AR000496. |
| HFRBN81 | 97 | 1182552 | 1-4099 | 15-4113 | |
| HFKJW01 | 98 | 1187134 | 1-475 | 15-489 | |
| HSDFL63 | 99 | 1219300 | 1-2578 | 15-2592 | AI811010, AW182310, AI669944, |
| | | | | | AA553658, AI149982, AW002490, |
| | | | | | AI138253, AI015322, AI417803, |
| | | | | | AW262574, AI338004, AW072451, |
| | | | | | AW073593, AI093838, AI027630, |
| | | | | | AI655339, AA922787, AI638037, |
| | | | | | AI095502, AW439551, AA913807, |
| | | | | | AW305307, AL042064, AA977416, |
| | | | | | AI205666, AA036837, AA036780, |
| | | | | | AA447978, AA356059, AA382934, |
| | | | | | AI611255, AI401469, AI280408, |
| | | | | | AI522175, AW263492, AA320515, |
| | | | | | AA382259, AA382933, AW450423, |
| | | | | | AA927003, AI933504, AI990172, |
| | | | | | AA552283, AA330729, AA382258, |
| | | | | | AB015228, AL110274, AL110299, |
| | | | | | AL137418, AB015226, AB015227, |
| | | | | | U60063, and X99273. |
| HPJET90 | 100 | 836503 | 1-542 | 15-556 | T03269, D58283, D80022, D80195, |
| | | | | | D80193, D59927, D51423, D59619, |
| | | | | | D80210, D51799, D80391, D80240, |
| | | | | | D81030, D80253, D80227, D80196, |
| | | | | | D80188, D59275, D80219, D80366, |
| | | | | | D80043, D80038, D59859, D80166, |
| | | | | | D80212, AI905856, D80269, D50995, |
| | | | | | D59889, C14429, D50979, D80134, |
| | | | | | D80378, D80024, D80045, C75259, |
| | | | | | AW178893, C14014, D59502, D57483, |
| | | | | | D59787, D59610, D51097, D80164, |
| | | | | | D80241, F13647, D80268, C14331, |
| | | | | | D51060, AW177440, D58253, C15076, |
| | | | | | D59467, D80949, D80168, C14227, |
| | | | | | AA305409, AW378532, AW178775, |
| | | | | | AW179328, C14389, AW352117, |
| | | | | | AW352158, AW177501, AW177511, |
| | | | | | D51079, AW178762, D51022, AW366296, |
| | | | | | AW360811, AW176467, AW375405, |
| | | | | | AA305578, AW377671, D59695, |
| | | | | | AW179220, AW360844, AW360817, |
| | | | | | D81026, AW375406, D80248, AW378534, |
| | | | | | AW179332, AW377672, AW179023, |
| | | | | | AW178905, AA514188, D52291, D80251, |
| | | | | | D80132, AW352170, AW352171, D80522, |
| | | | | | AW377676, AW177731, AW178907, |
| | | | | | AW179019, AW179024, AA514186, |
| | | | | | D80133, AW178906, AW177505, |
| | | | | | AW179020, AW178909, AW177456, |
| | | | | | AW179329, AW178980, AW177733, |
| | | | | | AW378528, AW178908, AW178754, |
| | | | | | AW179018, AW179004, AW178914, |
| | | | | | AW178911, AW367967, AA033512, |
| | | | | | AW352174, D80302, AW178774, |
| | | | | | AW177723, D80439, D80247, T48593, |
| | | | | | AW178983, D51103, AI535850, |
| | | | | | AW367950, C14975, AW178986, D45260, |
| | | | | | A67220, A62300, A62298, D34614, |
| | | | | | D26022, X67155, A25909, A84916, |
| | | | | | D89785, A78862, AR025207, D88547, |
| | | | | | AJ132110, AB012117, Y17188, A85396, |
| | | | | | AR066482, X82626, A85477, A86792, |
| | | | | | X93549, I19525, A44171, AR018138, |
| | | | | | X68127, AF135125, U87250, AF058696, |
| | | | | | AR008278, Y12724, AB028859, |
| | | | | | AR064240, A94995, D88507, AR008443, |
| | | | | | AB033111, I18367, I50126, I50132, |
| | | | | | I50128, I50133, AR066488, A82595, |
| | | | | | AR066490, AR016514, D50010, D13509, |
| | | | | | AR060138, A45456, A26615, AR052274, |
| | | | | | Y09669, AR060385, AB002449, |
| | | | | | AR066487, A43192, Z32749, A43190, |
| | | | | | AR038669, A30438, AR008408, U87247, |
| | | | | | U79457, AB023656, AR060133, X93535, |
| | | | | | and AR008382. |
| HEMFC61 | 101 | 836514 | 1-701 | 15-715 | AB015226, AB015227, AB015228, |
| | | | | | AL110299, X99273, and U60063. |
| HDTBR50 | 102 | 1174351 | 1-453 | 15-467 | |
| HACCH94 | 103 | 847143 | 1-1399 | 15-1413 | AI093369, AW292321, AA972431, |
| | | | | | N40174, AA746376, AA130392, |
| | | | | | AA286750, AA287684, R71586, R71568, |
| | | | | | R71587, H03136, H03946, R71567, |
| | | | | | AI471079, H97311, AA365025, AF039686, |
| | | | | | AF118670, AR034800, AF081916, |
| | | | | | AL161458, and AL161458. |
| HE8TI39 | 104 | 1223481 | 1-2820 | 15-2834 | AI681280, AA251688, W60548, Z45463, |
| | | | | | H86769, F07768, H86760, Z42543, |
| | | | | | R15292, AW339546, H86765, Z44339, |
| | | | | | H86774, H86962, AA091738, R58217, |
| | | | | | F06562, AW377760, and R21166. |
| HEGAP32 | 105 | 1140393 | 1-512 | 15-526 | AI814253, AW338148, AW192239, |
| | | | | | H72014, and AL137708. |
| HCWFU66 | 106 | 853005 | 1-392 | 15-406 | |
| HUSYI29 | 107 | 853149 | 1-763 | 15-777 | AA209183, AA811369, AA873372, |
| | | | | | AA304836, AW189673, AA326319, |
| | | | | | T11336, AI459087, H00191, and |
| | | | | | AL120282. |
| HMEFT66 | 108 | 1134131 | 1-919 | 15-933 | AI269592. |
| HKAAR71 | 109 | 863023 | 1-963 | 15-977 | AW068487, AW239526, T19084, R73854, |
| | | | | | AA984561, AA190644, R22358, R14385, |
| | | | | | AI968382, AA773650, AA425030, |
| | | | | | AW237628, AJ242972, and AJ242971. |
| H7TBC95 | 110 | 865922 | 1-692 | 15-706 | |
| HAPPX52 | 111 | 637493 | 1-2368 | 15-2382 | T47026. |
| HBGSJ13 | 112 | 1152326 | 1-744 | 15-758 | W22401, W22336, and W26219. |
| HFKLX38 | 113 | 880220 | 1-295 | 15-309 | AL136383. |
| HTLGP15 | 114 | 1165362 | 1-949 | 15-963 | AW173250, T08271, AI372624, |
| | | | | | AA350545, T10079, AA349847, |
| | | | | | AA351693, and AF060173. |
| HMEGH46 | 115 | 1092158 | 1-713 | 15-727 | AB033054. |
| HE8PY29 | 116 | 1129488 | 1-710 | 15-724 | AI271550, AI753504, AA809220, |
| | | | | | AW081079, AI264068, AW386283, |
| | | | | | AI219556, AW082138, AA455733, |
| | | | | | AI382746, AA548778, W78099, |
| | | | | | AA431230, AF092137, AF100751, and |
| | | | | | AF040252. |
| HTDAB17 | 117 | 890384 | 1-591 | 15-605 | AW410520, Z21669, AA334183, |
| | | | | | AW376427, and AC011078. |
| HCFCF47 | 118 | 1199931 | 1-1842 | 15-1856 | AL038713, AI264673, AI685116, |
| | | | | | AI887321, AI924175, AA189081, |
| | | | | | AI610776, AI818151, AI367384, |
| | | | | | AW157413, AI925647, AA767353, |
| | | | | | AA778304, AI559442, AI147839, |
| | | | | | AI110720, AL133942, AW089655, |
| | | | | | AI811494, W49501, AW084901, |
| | | | | | AI376984, AA085707, AI110640, |
| | | | | | AI132962, AW177120, AA493998, |
| | | | | | AI862874, N64574, AI675848, AI858607, |
| | | | | | N24958, AA807609, AA902828, AI749571, |
| | | | | | AI568919, AW074001, AI827133, |
| | | | | | AI817158, AI561208, AI250812, |
| | | | | | AI983921, AW177226, AI082077, |
| | | | | | AA130536, AI819528, AW139132, |
| | | | | | AA055654, AI027421, AI801377, |
| | | | | | AA724159, AI610326, AA932087, |
| | | | | | AA846188, AA864823, AW085676, |
| | | | | | W58442, AI453790, AI499286, AA659014, |
| | | | | | AW151307, T16214, AW090210, |
| | | | | | AA581433, AW262471, AI973178, |
| | | | | | AI189033, N26540, N76274, AI984510, |
| | | | | | AA709024, AI733728, AA581340, |
| | | | | | AW177317, AL044349, AW167452, |
| | | | | | AA130476, AA160519, AI811854, |
| | | | | | AI921101, AI369914, AW168798, |
| | | | | | AI479035, AA911409, AI346802, |
| | | | | | AI439860, AI034217, AW193992, |
| | | | | | AA493735, AI927861, AA287329, |
| | | | | | AW440317, AA129986, AI683685, |
| | | | | | AW102963, AA854527, AI246569, |
| | | | | | AW177237, AA346162, AA745961, |
| | | | | | T62931, AA889273, AI872415, W85828, |
| | | | | | AA847621, AA946637, AI197934, |
| | | | | | AW167319, AA907819, AA953572, |
| | | | | | AW272376, AL041411, AI862212, |
| | | | | | AI025602, AA092309, AI334099, C17235, |
| | | | | | AI439415, C06012, AI632138, AW130042, |
| | | | | | H20876, AI937684, AI538654, AA470572, |
| | | | | | AW023397, AI061131, AA811111, |
| | | | | | T69889, AA342331, AI874256, AI564253, |
| | | | | | AI440018, AI095849, AA157033, |
| | | | | | AI051341, AA771730, T57073, AA771711, |
| | | | | | AI926394, AI358417, AA174085, |
| | | | | | AI952804, AI860964, AI499811, |
| | | | | | AA368610, AI591332, AA136576, |
| | | | | | AA633390, W58428, AI619818, |
| | | | | | AA782144, AI291353, AA604138, |
| | | | | | AI393148, AA862481, AI863415, |
| | | | | | AA694579, AA176355, AI917243, |
| | | | | | AA169142, W33199, AA643785, W87732, |
| | | | | | AI285660, AA099788, AI955464, |
| | | | | | AI088796, AA347740, AA350922, |
| | | | | | AA961590, AA166854, AI871616, |
| | | | | | AA779937, AI290861, N77920, AA070814, |
| | | | | | AA508451, AI869945, AI051363, T06932, |
| | | | | | AI271865, C17730, AI813517, AI627862, |
| | | | | | AA132716, AI457328, AW235478, |
| | | | | | N20521, AA460715, H06476, AI336355, |
| | | | | | AA121916, AL119355, AA505616, |
| | | | | | AA598990, AI567544, AA559950, |
| | | | | | AW090739, AI949496, AI362951, |
| | | | | | AW168195, AA041332, N94967, |
| | | | | | AI004961, W31567, AA501873, |
| | | | | | AA629837, W19865, AA328438, W04638, |
| | | | | | AI310239, AI540098, AI375417, |
| | | | | | AW272291, AI086865, AI803229, |
| | | | | | AA876415, AA132536, T06365, |
| | | | | | AL031656, AL033379, AC002564, |
| | | | | | AC007381, AC005484, Z84719, |
| | | | | | AL023513, AL049734, AC007514, |
| | | | | | AC003084, AC004069, AL049867, |
| | | | | | AL049635, AC005181, AB017651, |
| | | | | | AC004050, AC004384, AL031407, |
| | | | | | AB019441, AC002349, AC007630, |
| | | | | | AC004650, AC004748, AC006463, |
| | | | | | AB020872, AC009405, AC003029, |
| | | | | | AL078477, AC006327, AL078638, |
| | | | | | AL135960, AJ131016, AC002385, |
| | | | | | AC003001, AL031054, Z98052, AL050348, |
| | | | | | AC006387, AC006198, AL132800, |
| | | | | | AC002079, AF207955, AP000355, |
| | | | | | AC004677, Z95325, AC007677, |
| | | | | | AC007358, AP000365, AL078604, |
| | | | | | AC005562, AC004875, AP000014, |
| | | | | | AB014082, AL121577, Z95328, |
| | | | | | AC003091, AC004022, AP000532, |
| | | | | | AC006396, Z97181, AC006374, |
| | | | | | AC005901, AC003085, AC000119, |
| | | | | | AL110505, AC006370, AL035542, |
| | | | | | AL009029, AL021940, AC007262, |
| | | | | | AC004891, AC003106, AC002122, |
| | | | | | AC004813, U96409, AL035088, |
| | | | | | AC003109, AL035397, AL035555, |
| | | | | | AC002458, AC005682, AC004053, |
| | | | | | AP000946, AJ007973, AC007671, Z70758, |
| | | | | | AL109759, AL121652, AC007402, |
| | | | | | AC008173, Z94721, AC004869, AP000962, |
| | | | | | AC006026, AC004536, AC002416, |
| | | | | | AL034377, AC007649, AC004664, |
| | | | | | AL080239, AC011198, AL033522, |
| | | | | | AC006296, AL109941, U70984, |
| | | | | | AC004822, AL136297, AC004757, |
| | | | | | AC005670, AL031671, AF130343, |
| | | | | | AC002471, AC002528, AC003013, |
| | | | | | AC005374, AC005993, AF117829, |
| | | | | | AL035633, AL049733, AL136018, |
| | | | | | AP000023, AL122007, AF095725, |
| | | | | | AL022100, AC004388, AL121578, |
| | | | | | AC004911, AL008722, AC004381, |
| | | | | | AC004701, AC007392, AC003100, |
| | | | | | AL023806, AF146191, AL033525, Z98304, |
| | | | | | AL022099, AL031115, AC007971, |
| | | | | | AL096867, Z94056, AC006239, |
| | | | | | AC005191, AC005053, AC004111, |
| | | | | | AD000091, AF121898, AC005799, |
| | | | | | AC007364, AC002485, AC002041, |
| | | | | | AC005521, AF130342, AL132994, |
| | | | | | AC004460, AC004999, AL109611, |
| | | | | | Z92542, AC005791, AC005082, |
| | | | | | AC004047, AL022401, AF152364, |
| | | | | | AL022097, AL121767, AL031313, |
| | | | | | AC006525, AJ251973, AC004987, |
| | | | | | AL031285, AC005820, AC006924, |
| | | | | | AC004749, AC006502, AF129078, |
| | | | | | AC005962, AC006971, AL078644, |
| | | | | | AP000473, AL034406, AP000455, |
| | | | | | AL022394, Z93019, AL021877, AC005297, |
| | | | | | AJ239321, AC006986, AF123462, |
| | | | | | AB023056, AC005922, AC007870, |
| | | | | | AC004223, AC003687, AL034399, |
| | | | | | AC007486, AB020868, AC006382, |
| | | | | | AL109659, AL049544, AL008627, |
| | | | | | AF207550, AF044083, AC005367, |
| | | | | | AC011594, AC004909, AL031684, |
| | | | | | AL031430, AL096772, AL050339, |
| | | | | | AC005681, AF055066, AC004894, |
| | | | | | AL049835, AL031737, AC003992, |
| | | | | | AC010722, AC007012, AC002379, |
| | | | | | AC004910, AC002492, AC006581, |
| | | | | | AL033380, AC007436, AC006369, |
| | | | | | AF070718, AC003692, AC004103, |
| | | | | | AC006504, AC006315, Z82212, |
| | | | | | AL009047, AC005284, AC004073, |
| | | | | | AC000114, AC004506, AL136295, |
| | | | | | AC008014, AL035700, AP000949, |
| | | | | | AC000109, U80017, AC006961, |
| | | | | | AP000033, AC003667, AC005913, |
| | | | | | AC005164, Z93018, AC006344, |
| | | | | | AC007377, and AC004178. |
| HDQHB19 | 119 | 1194798 | 1-1586 | 15-1600 | AW195239, AW149418, AA461376, |
| | | | | | AW005579, AI392913, AI378013, |
| | | | | | AA461199, AA779830, AI860240, |
| | | | | | AI436586, AA576717, AA147800, |
| | | | | | AI276889, AW337924, AA459985, |
| | | | | | AI264931, AI203549, AW104319, |
| | | | | | AA460078, AI377235, AI291778, |
| | | | | | AI925811, AI094031, AI612894, |
| | | | | | AA147758, AA639492, AA037273, |
| | | | | | R61563, AA463275, AA767986, AI289261, |
| | | | | | AA768536, AW166255, AA832298, |
| | | | | | H59980, N47107, AA157070, AA508841, |
| | | | | | AI360737, AA417605, AA628790, |
| | | | | | AA731955, R35919, AI273576, AI301339, |
| | | | | | AI682196, AA463188, AI208175, H59937, |
| | | | | | D20738, AI391726, W42645, R14353, |
| | | | | | AI271983, N30324, T53535, AI073411, |
| | | | | | H57854, N56657, AW001677, R35723, |
| | | | | | N50317, AA514325, AI242094, AA969269, |
| | | | | | AI808646, AI280324, AA360254, |
| | | | | | AI699261, AA263061, T77863, AA551384, |
| | | | | | AA741518, AA906804, AI091790, T11446, |
| | | | | | AI208678, AA031793, AA505982, |
| | | | | | AA214523, AA428834, T12550, T11445, |
| | | | | | AB026289, and AR044150. |
| HAGDN53 | 120 | 1129154 | 1-1553 | 15-1567 | AI671311. |
| HUFDB74 | 121 | 1162672 | 1-1535 | 15-1549 | AW411339, AI978930, AW090612, |
| | | | | | AI521584, C05134, AA025277, AI281896, |
| | | | | | AA190389, R80748, F13061, AA190814, |
| | | | | | T75371, R80747, AA074211, AI570569, |
| | | | | | AA296815, AA024667, F10653, AI370565, |
| | | | | | AW197990, AI254860, AC002117, |
| | | | | | AC002425, AC004671, AC005736, |
| | | | | | AC005899, AC005757, AL034549, |
| | | | | | AC003048, AF001552, AL031591, |
| | | | | | AC007637, AC009363, AC005837, |
| | | | | | AC004813, Z83822, AC005568, |
| | | | | | AC003101, AC005669, AC003010, |
| | | | | | AC004887, AL035684, AC008079, |
| | | | | | AC006312, AL022319, AC002302, |
| | | | | | M19364, AL109758, AL008583, |
| | | | | | AF111168, AC005071, AC004916, |
| | | | | | AC005088, AC002565, AP000252, |
| | | | | | AC005363, AC007685, AL009051, |
| | | | | | AL034417, AC007565, Z82245, Y14768, |
| | | | | | AC005606, L34079, AL022396, AL034423, |
| | | | | | AP000505, AL049871, AL117337, |
| | | | | | AC004104, AL024509, AC006026, |
| | | | | | AC002314, AC002352, AC005295, |
| | | | | | AL080243, AC009288, AC004963, |
| | | | | | AC004876, U63721, AL031737, Z82206, |
| | | | | | AC005666, AL021977, AC002472, |
| | | | | | AC004216, U91321, AP000501, |
| | | | | | AC006040, AC005183, Z98200, |
| | | | | | AL049709, AC007981, AC009464, |
| | | | | | Z97054, and AC005585. |
| HNHFH24 | 122 | 1092567 | 1-1015 | 15-1029 | AW023111, AI792578, AA570740, |
| | | | | | AA483606, AW069227, AI634187, |
| | | | | | AA515728, AA084609, AA565911, |
| | | | | | AI457313, AA568204, AI187148, |
| | | | | | AA856961, AA644090, AA557136, |
| | | | | | W96522, AI192440, AI440117, AI369580, |
| | | | | | AI610468, AW161016, AI054419, |
| | | | | | AI245693, N34689, AW189113, AI889579, |
| | | | | | AW245860, AA602906, AI583142, |
| | | | | | AI275982, AI494417, AI679294, |
| | | | | | AI755057, AI679871, AA126005, |
| | | | | | AA502207, AI362442, AA653823, |
| | | | | | AI342183, AL037714, AI636734, |
| | | | | | AA622801, AI866970, AI185394, |
| | | | | | AA469282, F28845, AA526099, |
| | | | | | AA714011, AA501461, AA133332, |
| | | | | | AA449997, AA635433, AW274072, |
| | | | | | AA191418, AI434513, R98218, AI925869, |
| | | | | | AA808861, AA279649, AA598892, |
| | | | | | AC004656, AC005736, AL049831, |
| | | | | | AC007371, AC005777, AC007993, |
| | | | | | AC002470, AF124523, AL117694, |
| | | | | | AC004975, AF104455, AL078477, |
| | | | | | AC003043, AL049539, AC005037, |
| | | | | | AF196972, AC005274, AC007542, |
| | | | | | AL109984, D87675, AC007917, |
| | | | | | AC005209, U78027, AC005696, U47924, |
| | | | | | AC005920, AC007298, AC005701, |
| | | | | | AC005500, AL035420, AL035422, |
| | | | | | AC005399, AC008064, AC006006, |
| | | | | | AL034423, AC004491, Z94056, |
| | | | | | AC005523, AC003982, AP000103, |
| | | | | | AP000032, AC007546, AC005972, |
| | | | | | AC005295, AP000555, AL035209, |
| | | | | | AF111169, AC004919, AC002091, |
| | | | | | AC004905, AC006486, AC005324, |
| | | | | | AL133448, AC003108, AC005004, |
| | | | | | AC004659, AC000025, AC004816, |
| | | | | | AC005527, AC005591, AC007690, |
| | | | | | AC004815, AC007327, Z82244, U91322, |
| | | | | | AL021154, AC006961, AC005529, |
| | | | | | AC004551, AC003110, AC005536, |
| | | | | | AC005730, AL031767, AL022313, |
| | | | | | AC006354, AC003681, AC005189, |
| | | | | | AC007386, AL049570, AP000263, |
| | | | | | AC006285, AC005280, AC005599, |
| | | | | | AP000100, AC005277, AL031228, |
| | | | | | AP000210, AP000132, AL022334, |
| | | | | | AC007934, AL121769, AL109801, |
| | | | | | AF196779, AL050343, AP000503, |
| | | | | | AL049776, AC005200, AC005075, |
| | | | | | AL031597, AP000193, AC006312, |
| | | | | | U62293, AC009247, Z93241, AC004983, |
| | | | | | AC005726, AL136295, AL035697, |
| | | | | | AC007731, AP000117, AC005952, |
| | | | | | AL031431, AL109952, Z84466, AC002301, |
| | | | | | Z93023, AC005513, AP000036, AC005409, |
| | | | | | AP000313, AP000050, AC008012, |
| | | | | | AC007437, Z82206, AC007242, |
| | | | | | AL034402, AC004020, AC006487, |
| | | | | | AC005901, AC006480, AL035683, |
| | | | | | AP000141, AC005330, AC004647, |
| | | | | | AF134726, AF031078, AC002316, |
| | | | | | AC007842, AF030876, AC005225, |
| | | | | | AC002476, AC006057, AC005067, |
| | | | | | AC006271, AC004796, AC004813, |
| | | | | | AL022394, AC003029, AL078611, |
| | | | | | AC005251, AC007041, AC007421, |
| | | | | | Z83844, AL034549, AC004383, |
| | | | | | AC003035, AC005180, AC005625, |
| | | | | | AP000228, AP000140, AP000088, U89337, |
| | | | | | AC005231, AC004805, AC004967, |
| | | | | | AC002477, U76667, AC007664, |
| | | | | | AL022476, Z49236, AL035086, AC004526, |
| | | | | | AP000212, AP000134, Z84467, AL033397, |
| | | | | | AL034421, AP000248, AC007773, |
| | | | | | AL109963, AF064857, AF042484, |
| | | | | | AP000497, AC007021, AL035684, |
| | | | | | AL021546, AC006597, AC004025, |
| | | | | | AP000302, AC004859, AC000134, |
| | | | | | AC006449, Z97630, AC003665, Z99714, |
| | | | | | AC004033, AC005095, AC005915, |
| | | | | | AP000558, AC005837, AL117352, |
| | | | | | AC000111, AC007938, AC005300, |
| | | | | | AL022326, AL033527, AL078584, |
| | | | | | AL033521, AL023553, AC005318, |
| | | | | | AC004673, AC004821, U73630, |
| | | | | | AC006255, AP000114, AP000046, |
| | | | | | AC002559, AC007052, AP000694, |
| | | | | | AC005682, AC003046, AC005531, |
| | | | | | AC006211, AL031589, AC005484, |
| | | | | | Z97876, AL050341, Z98036, AL049757, |
| | | | | | AC005245, AC004106, AC006077, |
| | | | | | AC003070, AC005013, AL049643, |
| | | | | | AC005332, AC005058, and AC006035. |
| HBGQT03 | 123 | 1188175 | 1-1204 | 15-1218 | AW193981, AA576536, AW439879, |
| | | | | | AA218860, AA587394, AW206358, |
| | | | | | AI735027, AI075695, AI749755, |
| | | | | | AW328242, AI073515, AI828816, |
| | | | | | AI283940, AA452508, AI741698, F25077, |
| | | | | | AA454093, AI280249, AI826261, |
| | | | | | AI567379, AA350150, AI251129, F26225, |
| | | | | | AI354257, AW129660, AA171893, |
| | | | | | AI357160, F26293, F36700, H24638, |
| | | | | | AI270014, AI952189, AA834233, |
| | | | | | AI689497, AI688448, F17480, Z38509, |
| | | | | | T11668, N93072, AW362737, T11669, |
| | | | | | AW273866, N93071, AW328241, and |
| | | | | | AF130979. |
| HETLF29 | 124 | 1103959 | 1-469 | 15-483 | AA960957, AI001155, and AC004664. |
| HOUGD29 | 125 | 1204931 | 1-2274 | 15-2288 | AW243053, AI674036, AI160750, |
| | | | | | AA426073, AI299702, AI079952, |
| | | | | | AA405859, AI805286, AI828341, |
| | | | | | AW022161, W24408, AI421345, |
| | | | | | AW206919, AA351454, AW118669, |
| | | | | | AI263265, AA640181, AW134737, |
| | | | | | R13311, AW135904, AW008702, |
| | | | | | AA041245, R40791, T16675, AI418741, |
| | | | | | AI572229, AA040806, AI057025, N93105, |
| | | | | | AA954204, AF117948, and AL050031. |
| HTEMV09 | 126 | 1128254 | 1-1347 | 15-1361 | AI818734, AA454060, AW268879, |
| | | | | | AA453640, AI377304, AI818733, |
| | | | | | AI681535, AI818743, AI741915, |
| | | | | | AA948041, AI198872, AW341578, |
| | | | | | AI267885, AA767746, AI677678, |
| | | | | | AI829855, AI677729, AW129267, |
| | | | | | AA947425, AA297313, AL041049, |
| | | | | | N67346, and AA889773. |
| HNTNB14 | 127 | 1128964 | 1-713 | 15-727 | F12661, T74243, R60839, AA349498, |
| | | | | | AA082976, and L22557. |
| HE2KZ07 | 128 | 1149808 | 1-695 | 15-709 | AA114993, AI696123, AI141657, |
| | | | | | AI986390, AI307294, AB004267, |
| | | | | | AF181984, AB023027, and D86556. |
| HSIGN57 | 129 | 1105444 | 1-1086 | 15-1100 | AW408450, T78839, and AB029015. |
| HLHBC30 | 130 | 1106654 | 1-770 | 15-784 | AI366170, W21960, AA047627, W22094, |
| | | | | | AA047570, W22769, AA359453, |
| | | | | | AA359449, AA128575, AI220321, and |
| | | | | | W22833. |
| HFBDJ13 | 131 | 1195217 | 1-1355 | 15-1369 | AI637673, AI982948, M86084, AW161837, |
| | | | | | AA568170, AA044809, AW157364, |
| | | | | | AI686957, AA191323, AI161414, |
| | | | | | AI140787, AI752687, R17699, AA742642, |
| | | | | | and AF030131. |
| HTPGG25 | 132 | 1217208 | 1-2771 | 15-2785 | AI681123, AI741848, AI636347, |
| | | | | | AI973055, AI554720, AI768326, |
| | | | | | AI871117, AI333117, AI745311, |
| | | | | | AW340966, AW192924, AA706712, |
| | | | | | AI091179, AI677802, AI889659, |
| | | | | | AI688189, AI804323, AI298377, |
| | | | | | AA535027, AI830304, AI139157, |
| | | | | | AW089901, AA018361, AA410579, |
| | | | | | AA416567, AW073842, AW316637, |
| | | | | | AI827376, AA417232, AI372513, |
| | | | | | AA411560, AW001905, AI796719, |
| | | | | | AI400032, AI334363, AI452964, |
| | | | | | AI085075, AI888902, AI400560, |
| | | | | | AA308319, T33187, AI372512, AI332395, |
| | | | | | AA877699, AA485507, AA017127, |
| | | | | | R85136, H94860, T33188, AW016699, |
| | | | | | AA324901, AA988884, R18537, AI925753, |
| | | | | | AA993373, AI263531, W05059, |
| | | | | | AA282629, F29641, AA378627, |
| | | | | | AA625328, H58095, R17859, AA354334, |
| | | | | | AW337874, AI559961, AA282410, |
| | | | | | AA126985, AI014243, AI671403, F07835, |
| | | | | | R01402, AA485352, R41526, Z39066, |
| | | | | | F04091, R43109, W04796, R01401, |
| | | | | | Z42943, AA128150, AW375092, C04525, |
| | | | | | T25085, F17839, N74669, AW371533, |
| | | | | | AW058382, AW371557, AL117482, |
| | | | | | Z61430, AW612722, and AW662030. |
| HSSMT34 | 133 | 911294 | 1-540 | 15-554 | AA378627, F07835, and AL117482. |
| HWWDN3 | 134 | 1152430 | 1-1254 | 15-1268 | AI671062, AI023330, AW243448, |
| | | | | | AI990947, AW081367, AW391909, |
| | | | | | AA448391, AI984688, AA448394, |
| | | | | | AI283270, AW014216, AI344135, |
| | | | | | AA127530, AA335984, AA377148, |
| | | | | | Z42084, R12430, and AA400585. |
| HCEPW85 | 135 | 911374 | 1-302 | 15-316 | N83965, AA326737, and H14153. |
| HMTAW83 | 136 | 1071602 | 1-487 | 15-501 | AI908321, AA831896, AR058970, |
| | | | | | AR058968, A68194, and AR058969. |
| HDMAV01 | 137 | 1194697 | 1-1796 | 15-1810 | AA639636, AI631313, AW295120, |
| | | | | | AA182022, AW085587, AI805706, |
| | | | | | AA181842, AA732237, AW275826, |
| | | | | | AI215758, AA482475, AI802881, N50527, |
| | | | | | AI582673, AI581648, AA687232, |
| | | | | | AA742653, AI678872, AI937512, |
| | | | | | AA043083, N95362, AA130860, |
| | | | | | AW303909, N50583, AA186576, |
| | | | | | AW149048, AA743626, AA972227, |
| | | | | | R82179, AA988476, H19646, AA872660, |
| | | | | | AA476734, AA040856, AA074515, |
| | | | | | W93062, AA649136, AA186539, |
| | | | | | AA443881, AW021342, AI039487, |
| | | | | | AA252656, H22712, AW006472, |
| | | | | | AI342673, N72971, AW316519, H01103, |
| | | | | | R82221, AW079113, W02736, H19647, |
| | | | | | H43529, F23483, AI681977, AA989257, |
| | | | | | AA357239, H01104, W21036, AA872966, |
| | | | | | AI908321, N93561, R57677, AA984133, |
| | | | | | AA306556, AI423661, AL120709, D19838, |
| | | | | | AW295339, AW403073, AA100099, |
| | | | | | H38954, AA297943, AA130916, |
| | | | | | AW007473, A68194, AR058970, |
| | | | | | AR058968, and AR058969. |
| HDPSR74 | 138 | 911396 | 1-709 | 15-723 | |
| HHEZT58 | 139 | 1160657 | 1-2197 | 15-2211 | AI653410, AI808115, AW103846, |
| | | | | | AI954664, AI809351, AL038027, |
| | | | | | AW365646, AA598677, AW118178, |
| | | | | | AA461436, AA461119, AI915224, |
| | | | | | AI452666, AI962619, AA384806, |
| | | | | | AA021033, AA317505, AW179253, |
| | | | | | AA054648, AI949041, R59010, H21414, |
| | | | | | AW450327, AI084523, AA813068, |
| | | | | | AW021195, AI242505, AA768247, |
| | | | | | AL046262, AL138455, AL035847, |
| | | | | | AA714441, AL042853, AI570389, |
| | | | | | AI821062, AA804728, AA760655, |
| | | | | | AA665057, AL042753, AL045943, |
| | | | | | AI493858, AW079656, AI027175, |
| | | | | | AA504562, AL049552, AF162270, |
| | | | | | AC004834, AP000208, AP000130, |
| | | | | | AP000247, AL049557, D83989, AL022315, |
| | | | | | AC009501, AL031281, AL109758, |
| | | | | | AC006313, AC002464, AC005291, |
| | | | | | AC002565, AC004837, AL022313, |
| | | | | | AL031393, AC007172, AC018767, |
| | | | | | AL021393, AL022165, AF222686, |
| | | | | | AC004987, AC005091, AC006112, |
| | | | | | AL110269, AC006115, AC011331, |
| | | | | | AC005156, AC002430, AC005088, |
| | | | | | AC004686, AC007384, AC005902, |
| | | | | | AP000697, AC004883, AC006501, |
| | | | | | AC006039, L30117, AL035458, AL035461, |
| | | | | | AC010206, AL035067, AL034417, |
| | | | | | AC005057, AC002472, AP000009, |
| | | | | | U96629, Z83840, AF053356, AC004383, |
| | | | | | AF091512, AP000344, U67211, U66059, |
| | | | | | AC000004, AC003070, AL096791, |
| | | | | | Z82206, AC005081, AC008067, |
| | | | | | AL034400, and AC007284. |
| HTLDU05 | 140 | 911649 | 1-589 | 15-603 | AA437044, AF113527, AB023062, and |
| | | | | | AF113520. |
| HTLET56 | 141 | 1189721 | 1-1390 | 15-1404 | AI968198, AI655275, AL044119, |
| | | | | | AW003563, AA397903, AL044168, |
| | | | | | AL044118, AW016204, AA625705, and |
| | | | | | Z74696. |
| HTLCA95 | 142 | 911655 | 1-1148 | 15-1162 | AI028227, AI798166, AI968058, |
| | | | | | AI962770, AC012616, and AC012616. |
| HTEJT86 | 143 | 1090517 | 1-1644 | 15-1658 | AI290635, AI097065, AI811210, |
| | | | | | AI655508, AI655489, AA402182, |
| | | | | | AA373381, AA948283, Z21336, AI984919, |
| | | | | | AI825441, Z21335, and AW467143. |
| HTEMA54 | 144 | 1134919 | 1-1483 | 15-1497 | AI954673, AI220421, AA813119, |
| | | | | | AA382989, AI024406, AF113526, |
| | | | | | AB023063, and AF113519. |
| HTLGJ17 | 145 | 1135518 | 1-573 | 15-587 | |
| HOUES64 | 146 | 918119 | 1-304 | 15-318 | |
| HMSCD15 | 147 | 982250 | 1-642 | 15-656 | AA864599, AA828277, AW270419, |
| | | | | | AA761244, AA262754, AA779760, |
| | | | | | W37119, AA206843, Z42584, AA206842, |
| | | | | | and AB011126. |
| HDQDX20 | 148 | 1223474 | 1-2688 | 15-2702 | AI905612, N63562, N75655, N94726, |
| | | | | | AA297704, N64807, AW265468, |
| | | | | | AA601376, AW162314, AW162332, |
| | | | | | AI318548, AW410844, AL042753, |
| | | | | | AL121039, AI702049, AI547110, |
| | | | | | AI919048, AA845690, AW021674, |
| | | | | | AA280886, AW328185, AI076729, |
| | | | | | AW327673, AL138455, AA526542, |
| | | | | | AL118628, AW148821, AI754926, |
| | | | | | AI344906, AI064968, AW419201, |
| | | | | | AI065031, AI129421, AL041924, |
| | | | | | AI090377, AI252005, AI254463, |
| | | | | | AW409621, AA313025, AA610644, |
| | | | | | AA760655, AI797998, AI821901, |
| | | | | | AA557945, AA595661, AI860423, |
| | | | | | AA831426, AW021399, AA765899, |
| | | | | | AI174827, AI251024, AL042667, |
| | | | | | AL042670, AI003068, AW439224, |
| | | | | | AL042377, AI567676, AL134524, |
| | | | | | AI905408, AI570067, AA527633, |
| | | | | | AW022796, AI025355, AA525753, |
| | | | | | AI133355, AI224583, AI609992, N95424, |
| | | | | | AI281622, AI446618, AI745666, |
| | | | | | AA632355, AI791659, AW085626, |
| | | | | | AI815425, AI819419, AI884404, |
| | | | | | AA828840, AA631915, AI049845, |
| | | | | | AA133568, AI921744, AI114755, |
| | | | | | AL044966, W27084, AA524604, |
| | | | | | AL039436, AA084439, AI279417, |
| | | | | | AW023975, AW239465, AI753131, |
| | | | | | AW275432, AA847341, AW177869, |
| | | | | | AW192930, AW409626, AI049643, |
| | | | | | AW338525, AI828721, AA935827, |
| | | | | | AI857834, AI348780, AI744963, F35374, |
| | | | | | AI434103, AA601712, AL138262, |
| | | | | | AL138431, AW272815, AI445699, |
| | | | | | AI270280, AI888050, AW029626, |
| | | | | | AI150934, AL042731, AI003391, |
| | | | | | AL044701, AI924950, AA535558, H86399, |
| | | | | | AI733523, AW020612, AW069769, |
| | | | | | AA568433, H47461, AA167656, |
| | | | | | AL079698, H62123, AA196994, T03928, |
| | | | | | AI078409, AA015948, AI049892, |
| | | | | | AI815770, AW303052, AA558488, |
| | | | | | AA315052, AF169035, AF085233, |
| | | | | | AL049694, AC006084, AC006581, |
| | | | | | U93163, AC007298, AL022315, |
| | | | | | AC007050, L78810, AF196779, AC005081, |
| | | | | | AL031680, AC004891, AF113676, |
| | | | | | AC004895, AC005921, AC005015, |
| | | | | | AC005701, AC005291, AF207550, Z98941, |
| | | | | | AC006079, Z83844, U95739, AC005553, |
| | | | | | AL031846, AL021391, AC004263, |
| | | | | | AC004808, Z99716, AL008582, |
| | | | | | AC006312, Z93241, AC005519, |
| | | | | | AL121603, AC006115, AL080317, |
| | | | | | AL049538, AC002558, AL121595, |
| | | | | | AC004703, AC007172, AC006441, |
| | | | | | AL022238, AC007227, Z82206, |
| | | | | | AC004702, AP000116, AC007392, Z98752, |
| | | | | | AC005730, AL031311, AL022165, |
| | | | | | AC005039, AL021155, AL035551, |
| | | | | | AC005829, AC007055, AP000555, |
| | | | | | AC007237, AC005484, AF053356, |
| | | | | | AC005365, AC003982, AF038458, |
| | | | | | AL137100, AC004966, Z95152, AL049872, |
| | | | | | AL122020, AL049869, AL049557, |
| | | | | | AC005224, AC004797, AC005971, |
| | | | | | U85195, AC006538, AL078463, |
| | | | | | AC005585, AL031283, AL034549, |
| | | | | | AC007193, AF001549, AE000658, |
| | | | | | AC008372, AC006978, AC005251, |
| | | | | | AC007536, AC005695, Z82184, |
| | | | | | AL022723, AC007384, Z98949, AP000692, |
| | | | | | AL035587, AC006953, AL096701, |
| | | | | | AC005409, AC006013, AC005944, |
| | | | | | AL031433, AC005911, AL096703, |
| | | | | | AC005839, AP000210, AP000132, |
| | | | | | AC003108, AC006039, Z93017, AP000516, |
| | | | | | AC004659, AC006111, AL022721, |
| | | | | | Z77249, AF111168, Z94721, AP000212, |
| | | | | | AP000134, AL050338, AC005527, |
| | | | | | AC007390, AC005216, AF187320, |
| | | | | | AC002036, AC009510, AC005666, |
| | | | | | AC004673, AL021808, AC005225, |
| | | | | | AC004213, AL021453, AL008725, |
| | | | | | AC007242, AL008726, AP001046, |
| | | | | | AC005618, AC007878, AL031575, |
| | | | | | AC002350, AL049699, AL121653, |
| | | | | | AC003013, AC006966, AL031228, |
| | | | | | AL109984, AC002351, AC006509, |
| | | | | | AC005175, AL049569, AC006211, |
| | | | | | AC003037, Z98200, AC004805, AP000201, |
| | | | | | AL031229, AC006196, AC004913, |
| | | | | | AP000248, Z84466, AL022476, AL034379, |
| | | | | | AC005327, AL008712, AC004663, |
| | | | | | AC005017, AL021579, Z95114, |
| | | | | | AC002477, AC007537, U91322, |
| | | | | | AC007676, AC005900, AC002565, |
| | | | | | AP000097, AP000348, AC006277, |
| | | | | | AC011311, AC007546, U07563, L44140, |
| | | | | | AC007684, Z68284, AC003111, |
| | | | | | AC005529, AC005368, U07561, |
| | | | | | AC004000, AC004883, AL022316, |
| | | | | | AC005500, AC005369, Z82976, |
| | | | | | AC006571, AP000505, AC005821, |
| | | | | | AL034369, AC007057, AP000049, |
| | | | | | AL034421, AC007510, AL031594, |
| | | | | | AC005041, AC004821, AP000338, |
| | | | | | AC005071, AC008134, AP000030, |
| | | | | | AP000104, AL035086, AL132712, |
| | | | | | AL096803, AF064862, AC004383, |
| | | | | | D84401, AC003689, AF024533, |
| | | | | | AC002980, Z82211, AC005156, |
| | | | | | AC006539, AC007731, AC000090, |
| | | | | | AP000511, AP000211, AP000133, |
| | | | | | AC002306, AC003029, AD000092, |
| | | | | | AC003043, AC006275, AP000216, |
| | | | | | AC006157, Z84474, Z82208, AC005048, |
| | | | | | AC002133, AC006458, and AC005697. |
| HLTHP86 | 149 | 1110457 | 1-1837 | 15-1851 | AA663589, H16878, R56761, H84971, |
| | | | | | H16267, Z44040, Z44727, AA363673, |
| | | | | | T95749, H09671, AA809486, R91239, |
| | | | | | N50504, AA834548, N58608, AA872305, |
| | | | | | and AF161420. |
| HMSOL52 | 150 | 1182715 | 1-1289 | 15-1303 | AI911515, AI360955, AW028045, |
| | | | | | AI796049, AI609712, AW195544, |
| | | | | | AI184337, AI470056, AI361065, N34939, |
| | | | | | AI017177, AI038779, AI440241, |
| | | | | | AI651451, AA789292, AA854683, |
| | | | | | AI765258, AI702748, and AA384884. |
| HAHGD33 | 151 | 1219819 | 1-2211 | 15-2225 | AA058874, AA778668, AW408302, |
| | | | | | AA205441, AI127967, AI887424, |
| | | | | | AI479839, AI697118, AI313146, |
| | | | | | AI992196, W01185, AI828049, AA196613, |
| | | | | | AA988948, AW410815, AI569584, |
| | | | | | W44348, AI754108, AI858157, |
| | | | | | AW161181, AI809391, AI418172, |
| | | | | | AW378448, AW378426, AI554365, |
| | | | | | AA064738, N41640, AI129499, |
| | | | | | AW080159, AI079282, AI624100, Z43369, |
| | | | | | N29634, AA160313, AI476090, AI748939, |
| | | | | | H40577, W52734, AI828528, AA984486, |
| | | | | | AA723784, W73106, AI811703, AI982708, |
| | | | | | AA610087, H45144, AA975653, D31100, |
| | | | | | AA064739, AA226860, W79308, |
| | | | | | AA976982, AA961166, T35036, |
| | | | | | AA044358, AA969553, AW380268, |
| | | | | | AA961174, AW380277, AA192146, |
| | | | | | AA348984, C21229, R16767, AA348983, |
| | | | | | AI536815, W59987, AI632654, T35774, |
| | | | | | AW292300, T08259, AI368455, AI701960, |
| | | | | | AI969407, AI559435, AI285876, |
| | | | | | AI243806, AA232389, AI476704, |
| | | | | | AW410816, AA588076, AA918087, |
| | | | | | AA989405, AA639598, AA862740, |
| | | | | | AA160321, AI904952, Z39439, H46434, |
| | | | | | R10018, AA227210, N78192, AA977128, |
| | | | | | F35561, R40005, AW050898, H14918, |
| | | | | | AA852243, AA043840, N74228, |
| | | | | | AA719438, W45701, AI879824, |
| | | | | | AA249020, H79060, AA852244, T80752, |
| | | | | | H45445, AA353126, AA320390, R45977, |
| | | | | | AI187729, AW385198, AI364441, |
| | | | | | AI284294, AA862396, T81225, H46980, |
| | | | | | AA642250, R57404, H14625, AA295773, |
| | | | | | W79389, T12193, W52140, T81300, |
| | | | | | R13945, AI918467, T47464, AA043841, |
| | | | | | Z43504, AA404490, AA627362, D45662, |
| | | | | | AA205277, AA196528, C21486, AI739190, |
| | | | | | AI123849, AI205909, AI025702, and |
| | | | | | AF113249. |
| HHEHC53 | 152 | 921783 | 1-896 | 15-910 | AW408302, AW410815, AW161181, |
| | | | | | AA160313, AA226860, AA044358, |
| | | | | | AI632654, AA232389, Z43369, AA249020, |
| | | | | | T35774, AA852244, AA064738, |
| | | | | | AA295773, D31100, R13945, AA205277, |
| | | | | | T47464, T08259, AI904952, AF113249, |
| | | | | | AC009427, AC009427, and AC009427. |
| HE2PB01 | 153 | 1206665 | 1-1753 | 15-1767 | AA443164, AW020571, AA532437, |
| | | | | | AA315526, AW118680, AI167234, |
| | | | | | AI890631, AA744921, AI401545, |
| | | | | | AW195349, AW152040, AW074628, |
| | | | | | H06431, R74385, AA862392, H23357, |
| | | | | | AA649701, AW362722, AA160546, |
| | | | | | AI880570, D62917, AA973615, H23246, |
| | | | | | H46816, AI819867, H00507, AA329368, |
| | | | | | R21787, R21742, AA463453, C05953, |
| | | | | | R25958, R26764, AA639080, AI494615, |
| | | | | | AW070869, H71752, T84284, AA767232, |
| | | | | | AA160663, AI824357, and AF161399. |
| HOUDP52 | 154 | 1219522 | 1-1735 | 15-1749 | AA126458, AI091270, AA535353, |
| | | | | | AW129933, AI653554, AA809485, |
| | | | | | AI638693, AI208921, R73542, AW088345, |
| | | | | | R72907, AW105725, AA483641, |
| | | | | | AI828781, AI350843, AI970412, |
| | | | | | AI971578, AA121009, AI989884, |
| | | | | | AI671096, AI962165, AI632336, |
| | | | | | AI241787, AI580332, AA991236, |
| | | | | | AI587241, AA317304, AI655218, |
| | | | | | AA853441, and AI971684. |
| HHGAE47 | 155 | 1127881 | 1-733 | 15-747 | AW025529, AI475932, AW026010, |
| | | | | | AA886335, AA662803, AI056120, |
| | | | | | AW050607, AI885090, AI244837, |
| | | | | | AW449834, AI375435, AA878578, |
| | | | | | AA922036, AW197722, AA161103, |
| | | | | | AW058170, AI393408, AI056614, |
| | | | | | AA643750, AI560410, AI749095, |
| | | | | | AI720931, AI446208, AI913781, N52768, |
| | | | | | AI268967, AI277003, AA657904, |
| | | | | | AI914599, AA910277, AA485405, |
| | | | | | AI192693, AW050712, N52783, AI673692, |
| | | | | | AA631339, AA485566, AA158820, |
| | | | | | AI619710, AI560351, AI919380, N57590, |
| | | | | | AI832600, and N57604. |
| HMCGL45 | 156 | 1165349 | 1-1136 | 15-1150 | AW025529, AW026010, AI475932, |
| | | | | | AA886335, AA662803, AI056120, |
| | | | | | AI885090, AW050607, AI375435, |
| | | | | | AW449834, AI244837, AA878578, |
| | | | | | AI056614, AA922036, AW058170, |
| | | | | | AW197722, AI393408, AA161103, |
| | | | | | AI560410, AA643750, AI749095, |
| | | | | | AI720931, AI446208, AI913781, N52768, |
| | | | | | AA910277, AI277003, AI268967, |
| | | | | | AA657904, AI914599, AI192693, |
| | | | | | AA485405, AI673692, N52783, |
| | | | | | AW050712, AA158820, AA631339, |
| | | | | | AA485566, AI619710, AI560351, |
| | | | | | AI919380, N57590, AI832600, N57604, |
| | | | | | T25136, and AA299927. |
| HELEF11 | 157 | 1153884 | 1-1324 | 15-1338 | |
| HETJX04 | 158 | 1212235 | 1-844 | 15-858 | AA853282, AA370481, AA625156, |
| | | | | | AB025258, and AB025259. |
| HSOBC04 | 159 | 1165357 | 1-1194 | 15-1208 | AA115298, AI741325, AI688227, |
| | | | | | AI819333, AA452504, AI742595, |
| | | | | | AI925664, AI174530, AA115338, |
| | | | | | AA563582, AA461615, AA807844, |
| | | | | | N94422, W58424, AA569395, AI095261, |
| | | | | | AI142563, AA687480, AI567500, |
| | | | | | AA479551, AA582573, AA779677, |
| | | | | | N24393, AI280806, AI081428, AI863187, |
| | | | | | AA988617, AA834079, AW302361, |
| | | | | | AI362861, AW273442, AA553678, |
| | | | | | AA150123, AI752480, AI312661, W52661, |
| | | | | | AI298150, AA463418, W72509, |
| | | | | | AA024450, W72139, W79868, AI037968, |
| | | | | | H39596, AI028169, AA477651, W02690, |
| | | | | | AI198327, AI952450, AA926794, |
| | | | | | AI087245, W74236, H98040, AW004736, |
| | | | | | AI870989, AI689546, W76066, AI332748, |
| | | | | | AA150031, AI349417, W80872, H99144, |
| | | | | | AI334346, W52767, AA496878, |
| | | | | | AW166280, R40403, H25985, AI357863, |
| | | | | | R55375, AA363023, AA378409, |
| | | | | | AA595996, AW104147, AI687489, |
| | | | | | AI376184, T32290, AI979074, N26307, |
| | | | | | H97338, N95244, W77880, AI917258, |
| | | | | | W25604, AA024802, AI536791, |
| | | | | | AA577352, AA328156, AA359865, |
| | | | | | AA367475, AA358275, AA461442, |
| | | | | | W80763, T09474, AA987427, AI611160, |
| | | | | | AA888165, AA595303, AI918172, |
| | | | | | W30769, AI201782, W21074, AAI87662, |
| | | | | | AA411955, AA090719, AA411956, |
| | | | | | AA935961, AA451977, AI371307, |
| | | | | | AW074526, N79974, N39751, AI635472, |
| | | | | | AI612934, AA478489, AA102215, |
| | | | | | AI802295, AI750502, AA496836, |
| | | | | | AL133116, and L07063. |
| HE8PW83 | 160 | 1069980 | 1-1219 | 15-1233 | AA203427, AW024967, AA707382, |
| | | | | | N74230, AA875830, AI051580, AA975082, |
| | | | | | AI650913, AI651056, AA707184, N69106, |
| | | | | | AA938679, N69120, AA704705, AI283739, |
| | | | | | T72088, AW135507, R10286, R10287, |
| | | | | | AA010205, AW296131, AI085405, |
| | | | | | AA333931, AA873194, W01187, |
| | | | | | AF121182, AB002584, D38100, and |
| | | | | | AW611663. |
| HWLEA48 | 161 | 927676 | 1-415 | 15-429 | AA130828, AF169034, Z98752, and |
| | | | | | AF169033. |
| HNHNP81 | 162 | 1129143 | 1-1036 | 15-1050 | AW366296, D80045, AW375405, D51060, |
| | | | | | C14014, D58283, AA305409, D80253, |
| | | | | | D80024, D80166, D59619, D80210, |
| | | | | | D80240, D80366, AA514186, C14389, |
| | | | | | D80043, D81030, D80133, D80247, |
| | | | | | D59859, D80212, D51799, D80164, |
| | | | | | D80219, D51423, D80022, D80391, |
| | | | | | D59787, D80195, D80188, D80248, |
| | | | | | C14331, D59502, D59467, D57483, |
| | | | | | D59275, D59610, D80227, D81026, |
| | | | | | D50995, D80196, T48593, D80439, |
| | | | | | D80251, D80269, D59889, D51022, |
| | | | | | AI905856, D50979, D80268, D80522, |
| | | | | | C15076, D59927, AA305578, D80038, |
| | | | | | D80193, D80241, AA514188, AW375406, |
| | | | | | AW360811, D80378, AW177440, D80302, |
| | | | | | C05695, C14429, AW178893, AW377671, |
| | | | | | D80157, T03269, C75259, AW178906, |
| | | | | | AW179328, AW360844, AW360817, |
| | | | | | D59373, D51103, AW378534, AW179332, |
| | | | | | AW377672, AW179023, AW178905, |
| | | | | | D51759, AW360841, AW378532, |
| | | | | | AW177731, AW177501, AW177511, |
| | | | | | D58253, AW352171, AW377676, |
| | | | | | AW352170, AW178907, AW378528, |
| | | | | | AW178762, AW179019, D80132, |
| | | | | | AW179024, D80134, D51250, AW176467, |
| | | | | | AW178983, AW177505, D59653, |
| | | | | | AW179020, AW178775, AW178909, |
| | | | | | AW177456, AW179329, AW178980, |
| | | | | | AW178914, AW177733, AW178908, |
| | | | | | AW178754, AW179018, C06015, |
| | | | | | AW367967, AW352158, AW369651, |
| | | | | | AW352117, AW178774, AW352120, |
| | | | | | D45260, AW179004, D80949, AW179012, |
| | | | | | D81111, AW378525, D59695, AW352163, |
| | | | | | D52291, AW360834, D59627, D51079, |
| | | | | | AW378543, D80064, AW177728, H67854, |
| | | | | | D80168, AW179009, AI525923, C14298, |
| | | | | | AW352174, D80258, AW367950, |
| | | | | | AW178911, AW177722, AI910186, |
| | | | | | AW378540, C03092, H67866, C14227, |
| | | | | | AA809122, D51221, D59503, AW178781, |
| | | | | | D58246, T11417, D58101, AW177508, |
| | | | | | F13647, AI525917, C14407, AW178986, |
| | | | | | T03116, D80228, AI535686, Z21582, |
| | | | | | C14077, AW177497, D59317, D80014, |
| | | | | | D59474, AW177734, AI525920, |
| | | | | | AW177723, C14973, AI535850, C14344, |
| | | | | | AW378533, AA514184, D51213, D59551, |
| | | | | | D45273, C14957, AI525215, D60010, |
| | | | | | AI525235, D60214, AI525227, C14046, |
| | | | | | AI557774, AI525912, AI525925, D51097, |
| | | | | | AI525242, T03048, AA285331, |
| | | | | | AW378542, AI557751, AI525222, |
| | | | | | AW378539, Z30160, C16955, C05763, |
| | | | | | Z33452, T02974, D51053, AW360855, |
| | | | | | H67858, AI525237, C04682, T02868, |
| | | | | | C13958, A62298, A62300, AB028859, |
| | | | | | A82595, AR018138, A94995, AJ132110, |
| | | | | | A84916, AR008278, Y17188, AF058696, |
| | | | | | AR016514, AR060385, Y17187, |
| | | | | | AB002449, A43190, X67155, D26022, |
| | | | | | Y12724, A25909, D89785, AR038669, |
| | | | | | A67220, A78862, D34614, AR008443, |
| | | | | | A30438, I50126, I50132, I50128, I50133, |
| | | | | | D88547, AR066488, AR060138, A45456, |
| | | | | | A26615, AR052274, X82626, Y09669, |
| | | | | | A43192, AR066487, I14842, AR025207, |
| | | | | | AR054175, D50010, AR066490, |
| | | | | | AR008277, AR008281, A63261, I18367, |
| | | | | | AR008408, AR062872, A70867, |
| | | | | | AR016691, AR016690, U46128, D13509, |
| | | | | | AR060133, AB012117, A64136, A68321, |
| | | | | | I79511, X68127, U79457, AF123263, |
| | | | | | AR032065, Z82022, A63887, and |
| | | | | | AR008382. |
| HFIDL68 | 163 | 1123641 | 1-1148 | 15-1162 | AI805323, AI375172, AL119457, |
| | | | | | AL119399, AL119511, AL119324, |
| | | | | | AL134524, AL042544, AL043152, Z99396, |
| | | | | | AL042382, AL043168, AI431323, |
| | | | | | AI582910, AL038837, AL079794, |
| | | | | | AL037051, AL036725, AL037081, |
| | | | | | AL046052, AA631969, AL039074, |
| | | | | | AW151132, AL036418, AL042866, |
| | | | | | AW058275, AL045413, AI282249, |
| | | | | | AL119443, AL039085, AL039564, |
| | | | | | AL039456, AA580663, AL036858, |
| | | | | | AL039156, AW151974, AI927233, |
| | | | | | AL039108, AL038509, AI539771, |
| | | | | | AI432644, AI537677, AI494201, |
| | | | | | AL039109, AI804505, AI500659, |
| | | | | | AI815239, AL039128, AI446536, |
| | | | | | AI866465, AI815232, AI866691, |
| | | | | | AI801325, AI500523, AI538850, |
| | | | | | AW392670, AI358271, AI887775, |
| | | | | | AI582932, AI923989, AI590043, |
| | | | | | AI872423, AI284517, AI500706, |
| | | | | | AI635082, AI445237, AI491776, |
| | | | | | AW151138, AI289791, AI926593, |
| | | | | | AI889189, AI521560, AI500662, |
| | | | | | AI285417, AI582912, AI284509, |
| | | | | | AI539800, AW172723, AI440263, |
| | | | | | AI538885, AI889168, AI866573, |
| | | | | | AI633493, AI434256, AI866469, |
| | | | | | AI805769, AI434242, AI888661, |
| | | | | | AI500714, AI284513, AI888118, |
| | | | | | AI285439, AI859991, AI436429, |
| | | | | | AI889147, AI355779, AI623736, |
| | | | | | AI581033, AI371228, AI932794, |
| | | | | | AI491710, AI440252, AI431307, |
| | | | | | AI440238, AW089844, AI567971, |
| | | | | | AI866786, AI860003, AI610557, |
| | | | | | AI431316, AI242736, AI539260, |
| | | | | | AI828574, AI698391, AI887499, |
| | | | | | AW151979, AI539781, AI702065, |
| | | | | | AI539707, AI801286, AI885949, |
| | | | | | AI638644, AW089557, AI285419, |
| | | | | | AI559957, AI521571, AI469775, |
| | | | | | AI866581, AW074057, AI567953, |
| | | | | | AI815150, AI446495, AI867068, |
| | | | | | AI952433, AI889191, AI225248, |
| | | | | | AI698352, AI371229, AL036924, |
| | | | | | AW151136, AI440260, AI584130, |
| | | | | | AI355126, AI440236, AA761608, |
| | | | | | AL036241, AW189301, AI623302, |
| | | | | | AI866458, AI431238, AI469784, |
| | | | | | AW194509, AI370623, AL079741, |
| | | | | | AL042365, AI345688, AI436438, |
| | | | | | AI890907, AI357672, AI623941, |
| | | | | | AI554821, AI561170, AI586931, |
| | | | | | AI859644, AI924051, AI690946, |
| | | | | | AI371251, AI869377, AI866510, |
| | | | | | AI648567, AL119791, AL047849, |
| | | | | | AI866461, AI923046, AI433157, |
| | | | | | AI457113, AI434240, AI632036, |
| | | | | | AL047422, AI954200, AA641818, |
| | | | | | AI345010, AL048403, AW023072, |
| | | | | | AI610714, F36033, AL037094, AI250282, |
| | | | | | AL047398, AI648699, AI610616, |
| | | | | | AI887163, AW384394, AI049850, |
| | | | | | AI469764, AI284516, AL045166, |
| | | | | | AW019988, AI354981, AL039659, |
| | | | | | AI798359, AL038531, AI653829, |
| | | | | | AW074651, AI383510, AW238753, |
| | | | | | AI469754, AW075382, AW083572, |
| | | | | | AI371243, AI419455, AI537925, |
| | | | | | AW151970, AI049859, N25033, |
| | | | | | AL036196, AL119863, AW162194, |
| | | | | | AI560954, AL135012, AI439995, |
| | | | | | AI887785, AL039390, AI493559, |
| | | | | | AI963849, AI955221, AI566386, |
| | | | | | AI559976, AI250353, AI274759, |
| | | | | | AI432666, AL049048, T66952, N29277, |
| | | | | | AW245729, AI866419, AI433976, |
| | | | | | AW363220, AL038986, AL047611, |
| | | | | | AI349256, AI798456, AR060234, |
| | | | | | AR066494, AR023813, U77594, A81671, |
| | | | | | AR064707, AR069079, S75997, L10353, |
| | | | | | Y11587, AL133084, AF115410, AL133559, |
| | | | | | S82852, M85164, U72621, U30290, |
| | | | | | AL137479, AC002464, AF090943, |
| | | | | | AL133070, AJ005690, AF176651, |
| | | | | | AJ238278, AL137529, AF132676, |
| | | | | | AF061836, I09499, U83172, AR029490, |
| | | | | | AL133016, X70685, E12580, AL137533, |
| | | | | | AL122101, AL133049, AL049423, |
| | | | | | AB007812, AF180525, Z35309, AF013214, |
| | | | | | AF079763, AL023657, AR038854, |
| | | | | | AL133640, AL133655, AF090900, |
| | | | | | AF043642, AL110199, AF113694, |
| | | | | | AL122104, AL133053, AF060866, I25049, |
| | | | | | A03736, AL049276, AR020905, |
| | | | | | AF161699, AF067728, E04233, AL137554, |
| | | | | | AF146568, E13998, AL137521, M79462, |
| | | | | | AL133560, AF119336, I28326, D44497, |
| | | | | | Y09972, A07647, AL049466, A08910, |
| | | | | | AL110218, S54890, X61970, AF002985, |
| | | | | | A08909, U49434, AR034821, AL080129, |
| | | | | | U49908, A60092, A60094, AF031572, |
| | | | | | AF077051, A08908, X66862, AL110196, |
| | | | | | A77033, A77035, AF113699, X63162, |
| | | | | | AF068615, U51123, AF177401, S69407, |
| | | | | | AL117435, AL137268, AF098162, |
| | | | | | AL137550, AL049447, AL136884, |
| | | | | | AF113677, AB028451, AL133557, |
| | | | | | AL133015, AL133608, S53987, I32738, |
| | | | | | A18777, AF076633, AF067790, M19658, |
| | | | | | Y16645, AL080159, AL050172, AF106697, |
| | | | | | S77771, AR068466, AL133619, E02221, |
| | | | | | Z97214, AL080118, E05822, AL117587, |
| | | | | | E12579, A08913, AF080622, I89947, |
| | | | | | AL117443, AL110269, AF182215, |
| | | | | | AR068751, AL122049, Y10823, |
| | | | | | AF131821, AF112208, X67813, AC004213, |
| | | | | | AF026816, A08907, U76419, Z13966, |
| | | | | | A08912, AF090903, I25048, AL110280, |
| | | | | | M80340, D83032, A08911, AC004200, |
| | | | | | E12747, AB016226, AL133067, I48978, |
| | | | | | Y11254, AL122050, AL117460, AF061795, |
| | | | | | A58545, AF151685, I03321, AL137292, |
| | | | | | AF032666, AF090896, AF047716, I89931, |
| | | | | | AF113690, AL117438, I42402, Y10080, |
| | | | | | Z82022, AL117582, AF100931, AL137281, |
| | | | | | AL133062, AJ010277, AF016271, |
| | | | | | AF004162, U78525, AL050155, AL096751, |
| | | | | | S76508, AF061573, AB026128, X83508, |
| | | | | | U72620, I89934, I89944, I49625, A32826, |
| | | | | | A32827, X60769, AF148129, AL137560, |
| | | | | | AF026030, AF111849, AL117394, |
| | | | | | AF030513, AF002672, AL137555, X65873, |
| | | | | | AF104032, A18788, AF106945, E02914, |
| | | | | | AF175903, AC018767, AL137478, |
| | | | | | A49139, AL137459, AF094480, AF126488, |
| | | | | | AF124728, AL080140, AL136842, U73682, |
| | | | | | Y08616, AL096728, A27171, AL137259, |
| | | | | | AL133565, E01614, E13364, X06146, |
| | | | | | AF102578, M92439, L24896, Y13350, |
| | | | | | AF118090, AL137271, AF111851, L13297, |
| | | | | | U86379, and X59812. |
| HUJCT05 | 164 | 1165261 | 1-1632 | 15-1646 | AW268357, AI889091, C15588, AI949350, |
| | | | | | AI056961, AI124874, R39133, AA887911, |
| | | | | | AW023386, AC003962, and AF155116. |
| HTEGO05 | 165 | 932583 | 1-1086 | 15-1100 | AA059465, AA059211, AA731209, |
| | | | | | AA236961, T86500, T87461, AL024498, |
| | | | | | and M35862. |
| HRDBH58 | 166 | 1226719 | 1-2731 | 15-2745 | AI863355, AI863364, AI674922, |
| | | | | | AI754389, AI056058, AW295190, |
| | | | | | AI623178, AW131720, AI949042, |
| | | | | | AI056059, AA356949, AI668970, |
| | | | | | AA620354, C14389, C15076, D59467, |
| | | | | | D80164, D59787, D81026, C14331, |
| | | | | | D51423, D81030, D80195, D80391, |
| | | | | | D80166, C14429, D59275, D58283, |
| | | | | | D59859, D59927, D80196, D80022, |
| | | | | | D80253, D59889, D59619, D80210, |
| | | | | | D51799, D80240, D80043, D80227, |
| | | | | | D59502, D59610, D50995, D80212, |
| | | | | | D80038, D80188, D80219, D57483, |
| | | | | | D80366, D80269, D80193, D51022, |
| | | | | | D50979, AW177440, D80251, D80241, |
| | | | | | AW378532, AI557751, AA305409, |
| | | | | | D80024, D80378, D80045, T03269, |
| | | | | | AW178893, AA305578, D80522, D51060, |
| | | | | | C75259, AW179328, D80248, C14014, |
| | | | | | AW352158, T11417, D51250, AA514188, |
| | | | | | D80134, C14407, AW369651, AW178762, |
| | | | | | AW178775, AW177501, AW177511, |
| | | | | | AW176467, AW360811, AA514186, |
| | | | | | D80133, D58253, D80268, F13647, |
| | | | | | AW352117, AW377671, AW375405, |
| | | | | | C05695, AW378540, AI910186, |
| | | | | | AW366296, AW360844, AW360817, |
| | | | | | AW377676, AW375406, AW378534, |
| | | | | | AW179332, AW377672, AW179023, |
| | | | | | AW178905, D80439, AW352170, |
| | | | | | AI905856, D80302, AW177505, D80132, |
| | | | | | AW352171, AW178906, AW177731, |
| | | | | | AW178907, AW179019, AW179024, |
| | | | | | D80247, AW360841, AW179020, C06015, |
| | | | | | D51213, AW178909, AW177456, |
| | | | | | AW179329, AW178980, AW177733, |
| | | | | | AW378528, AW178908, AW178754, |
| | | | | | AW179018, AW360834, C14227, Z21582, |
| | | | | | AA809122, AW179004, AW179012, |
| | | | | | D80014, AW352174, AW178914, |
| | | | | | AW378525, D81111, D51759, D51097, |
| | | | | | T02974, D51103, AW177722, AW177728, |
| | | | | | D80157, AW179009, D80258, AW178774, |
| | | | | | AW178911, AW378543, AA285331, |
| | | | | | AW352163, AW367967, AW178983, |
| | | | | | AW352120, AI557774, AW178781, |
| | | | | | T48593, D59627, D58246, AW177723, |
| | | | | | D59503, D59653, D45260, D58101, |
| | | | | | C03092, D80168, AW367950, AW177508, |
| | | | | | C14344, AI535850, H67854, AW378533, |
| | | | | | D80949, H67866, C14975, AW178986, |
| | | | | | D80064, C14973, AW177497, AI525923, |
| | | | | | AI535686, AW177734, AI525917, D51079, |
| | | | | | T03116, D59317, D51221, AA514184, |
| | | | | | AI525227, D59474, AI535959, AI525920, |
| | | | | | D60010, AI535961, AW378539, D45273, |
| | | | | | D59551, C14046, D60214, AI525235, |
| | | | | | AW378542, AI525242, AI525912, |
| | | | | | AI525925, AI525215, C16955, A84916, |
| | | | | | A62298, AR018138, Y17188, A62300, |
| | | | | | AJ132110, A25909, X67155, AF058696, |
| | | | | | D26022, AR008278, A67220, D89785, |
| | | | | | A78862, D34614, AB028859, X82626, |
| | | | | | D88547, Y12724, A82595, I82448, |
| | | | | | AR025207, X68127, AR008277, |
| | | | | | AR008281, A30438, A94995, AR060385, |
| | | | | | AR008443, AB002449, AB012117, I50126, |
| | | | | | I50132, I50128, I50133, A85396, |
| | | | | | AR066482, A44171, AR066488, |
| | | | | | AR016514, A85477, AR060138, A45456, |
| | | | | | I19525, A86792, Y17187, X93549, |
| | | | | | A26615, AR052274, Y09669, U79457, |
| | | | | | A43192, A43190, AR038669, U87250, |
| | | | | | AR066487, X64588, AR066490, D88507, |
| | | | | | AR054175, D50010, I14842, I18367, |
| | | | | | AF135125, A63261, U46128, AR016691, |
| | | | | | AR016690, AR008408, AR062872, |
| | | | | | A70867, D13509, A64136, A68321, |
| | | | | | AR060133, I79511, AB023656, AF123263, |
| | | | | | AB033111, AR032065, X93535, |
| | | | | | AR008382, AA159456, and AI990060. |
| HSDGW22 | 167 | 934467 | 1-312 | 15-326 | AF071071, AF170303, AF170304, |
| | | | | | AF077658, and AF071070. |
| HNTMD79 | 168 | 1126594 | 1-649 | 15-663 | AA305176. |
| HCE5J51 | 169 | 1197900 | 1-2796 | 15-2810 | AA622725, AI022884, AI003586, |
| | | | | | AI420804, AI682458, H19352, AI808077, |
| | | | | | AA324320, AA855153, W19561, |
| | | | | | AA325225, AA324316, AA853261, |
| | | | | | H18913, H11459, AW014428, AI148776, |
| | | | | | AI659608, AI675556, AW006008, T26639, |
| | | | | | AA853262, and U71294. |
| HHEFQ42 | 170 | 1151482 | 1-1261 | 15-1275 | N21687, AA447158, W42824, AA046565, |
| | | | | | AI693814, AI092205, AW377670, |
| | | | | | AA443786, AI160460, AI808004, |
| | | | | | AA160291, N34495, R70372, AW008266, |
| | | | | | AA393368, AA769319, AA977890, |
| | | | | | AI332771, AA089858, AA367462, |
| | | | | | AI806021, AA160290, AA164499, |
| | | | | | AA357550, AA909368, AI337806, |
| | | | | | W42734, N31093, AA521439, AA600712, |
| | | | | | AI587601, AI491781, AA047086, |
| | | | | | AA933922, AA078980, N49165, AI623941, |
| | | | | | AW163834, AW020328, AL036705, |
| | | | | | AW151974, AI249946, AI588892, |
| | | | | | AL138406, AW021717, AI648494, |
| | | | | | AW051088, AI345131, AI619820, |
| | | | | | AI500061, AI434731, AA641818, |
| | | | | | AI524654, AI860027, AW020046, |
| | | | | | AL120307, AL038505, AW087987, |
| | | | | | AI919500, AI334893, AW020397, |
| | | | | | AI401697, AA834534, AI538850, |
| | | | | | AI698391, AI659043, AL036901, |
| | | | | | AI440238, AI890907, AW075382, |
| | | | | | AI799313, AI866465, AI696340, |
| | | | | | AW151132, AW083111, AI590043, |
| | | | | | AI627714, AL134840, AW195253, |
| | | | | | AI473536, AI499325, AL138399, |
| | | | | | AL047100, AI884318, AI619525, |
| | | | | | AI249389, AI244249, AL048323, |
| | | | | | AI590755, AW161098, AW129117, |
| | | | | | AL048340, R36271, AI635634, AA765029, |
| | | | | | AA229532, AI491852, AI859991, |
| | | | | | AI690813, AL039730, AA503384, |
| | | | | | AW196720, AI373276, AI741158, |
| | | | | | AI289791, AI699823, AI345745, |
| | | | | | AI431323, AI538764, AI538885, |
| | | | | | AI301710, AA857847, AI244343, |
| | | | | | AI287233, AI241678, AW132034, |
| | | | | | AI277325, AA977968, AA808175, |
| | | | | | AA575874, AI559752, AA001397, |
| | | | | | AL037602, AL045413, AI499986, |
| | | | | | AI923989, AL118781, AL037582, |
| | | | | | AI310575, AI863665, AW188525, |
| | | | | | AI310582, AW020419, AW161579, |
| | | | | | AI879377, AI285439, AI472487, |
| | | | | | AW022093, AW020095, AA648480, |
| | | | | | AI340533, AW170787, AA669025, |
| | | | | | AI685005, AI343325, AL041587, |
| | | | | | AI872104, AI419826, AI345010, |
| | | | | | AI955441, AI581033, AA928539, |
| | | | | | AA127565, AI567971, AI953562, T69241, |
| | | | | | AI784214, AI553645, N33175, AI470717, |
| | | | | | AI499570, AI872423, AI370623, |
| | | | | | AL037454, AI538692, N99092, AL121014, |
| | | | | | AW191844, R32821, AI621341, AI633125, |
| | | | | | AA848053, AW022602, AI287476, |
| | | | | | AI718513, AI538564, AI350489, |
| | | | | | AA502794, AW021464, AI796113, |
| | | | | | AI915291, AA580663, AW152182, |
| | | | | | AL118752, W45039, AL047344, |
| | | | | | AW162189, AI355779, AI312210, |
| | | | | | AI582932, AI688848, AI620864, |
| | | | | | AI634736, AI524179, AI583578, |
| | | | | | AI889189, AI521560, W46378, |
| | | | | | AW089844, N75779, AI539800, |
| | | | | | AW082607, AI800473, AW104141, |
| | | | | | AI309306, AW029457, AI927233, |
| | | | | | AA761557, AA939199, AI805603, |
| | | | | | AI858827, AA470523, AI479292, |
| | | | | | AL043981, AI866469, AA830406, |
| | | | | | AW263569, AI801325, AI500523, |
| | | | | | AI886355, AR000496, U39656, X65873, |
| | | | | | AF126372, AF069506, A65965, A65943, |
| | | | | | AF201468, AF141289, A49139, AJ005690, |
| | | | | | AL136884, X06146, A17115, A18079, |
| | | | | | AR013797, Y16645, AF126247, A77033, |
| | | | | | A77035, AF177401, AL137479, |
| | | | | | AR038854, AL096744, AL110269, |
| | | | | | X66871, AL122106, AL133113, |
| | | | | | AL137627, AF087943, I32738, AR068466, |
| | | | | | A58524, A58523, AF113690, S77771, |
| | | | | | AL137533, AL050277, U02475, |
| | | | | | AL133557, Y07905, I48978, AL080159, |
| | | | | | E12580, A08913, M85165, AF039138, |
| | | | | | AF039137, A08907, E05822, X70685, |
| | | | | | AJ238278, A08912, AL117457, AF125948, |
| | | | | | A08910, A08911, A08909, AL110158, |
| | | | | | AL049276, A08908, AF145233, U70981, |
| | | | | | AL110196, E12579, AL137459, X01775, |
| | | | | | AF151109, S76508, D16301, A48221, |
| | | | | | X76228, AB028451, AF031147, AF061981, |
| | | | | | AL050155, AL080148, E06743, Z97214, |
| | | | | | A48220, I89947, AL122110, X56039, |
| | | | | | AR068753, X59812, AF090903, AF140224, |
| | | | | | D83032, A15345, A23327, AF090934, |
| | | | | | AF067728, AL122100, AL137275, |
| | | | | | AL137488, AL080129, U91329, |
| | | | | | AL133665, A18777, I89931, A08456, |
| | | | | | AF031903, AF017437, AL137478, A76335, |
| | | | | | AL137271, U58996, I52013, AF079763, |
| | | | | | AL117460, AL137529, L04504, AL080074, |
| | | | | | U88966, I08319, I89934, I89944, L24896, |
| | | | | | I49625, AL049465, AL122104, I33392, |
| | | | | | AL137258, U55017, X67688, M27260, |
| | | | | | AL050149, U62807, I18358, I34395, |
| | | | | | AF047443, U42766, E08516, AL049447, |
| | | | | | X97332, AF091084, AF097996, AL117438, |
| | | | | | E02349, AL133081, AF200464, AF183393, |
| | | | | | A91160, I66342, S82852, AF004162, |
| | | | | | AL117435, A91162, M79462, A65341, |
| | | | | | AL137530, AL050172, L13297, AF017152, |
| | | | | | M96857, AL133075, AL023657, |
| | | | | | AL080126, AF061573, AF106862, |
| | | | | | AB026128, AL110280, I68732, AF035161, |
| | | | | | AL133560, AF026816, I79595, AF002985, |
| | | | | | Y13653, S63521, A65340, AL050024, |
| | | | | | AL122050, AL133640, X72624, I36502, |
| | | | | | AF061795, AF151685, AJ010277, |
| | | | | | AL137294, AF139373, AL137267, A18788, |
| | | | | | X57961, AF047716, X72387, AL080118, |
| | | | | | E02152, S61953, AL117648, AF113694, |
| | | | | | S78453, AL049300, A86558, AL137298, |
| | | | | | X83544, AF107847, Z82022, M85164, |
| | | | | | X84990, AL137554, AB007812, |
| | | | | | AF090886, AL050116, AL133016, U37359, |
| | | | | | AL137256, AL117440, AL137722, |
| | | | | | AF112208, AF081571, AL122093, |
| | | | | | AL110222, AF182215, AF061943, |
| | | | | | AF000167, AL080060, AL049339, S36676, |
| | | | | | AL049430, AF131821, I46765, AF111849, |
| | | | | | AL117649, U83172, X99717, AF158248, |
| | | | | | AL122118, AF180525, AF030513, A12297, |
| | | | | | AL137254, AL137521, A23630, AF113013, |
| | | | | | AL137537, AF111112, AR020905, and |
| | | | | | A57389. |
| HLQDC55 | 171 | 1082368 | 1-691 | 15-705 | |
| HFPHI62 | 172 | 1195825 | 1-3146 | 15-3160 | AA988953, N63548, AA663569, H38453, |
| | | | | | H15532, H41422, AA976078, N94873, |
| | | | | | H46380, N51089, R88023, H41541, |
| | | | | | H48172, H38492, R18083, AI423964, |
| | | | | | AI003013, H11023, AI421373, R90757, |
| | | | | | R88479, H85702, R40487, AI208504, |
| | | | | | R42977, R87980, AA338374, AW207073, |
| | | | | | H15589, AA319224, AA325807, H84794, |
| | | | | | H10745, AA338373, W28283, R13057, |
| | | | | | AA325143, N54215, AB023202, D13613, |
| | | | | | AC004551, D29965, U12571, and |
| | | | | | AC004465. |
| HE8QH09 | 173 | 1152238 | 1-1439 | 15-1453 | AW451023, F08666, Z41650, AA594745, |
| | | | | | D45858, D28512, and AB000893. |
| HFAAX29 | 174 | 1128791 | 1-842 | 15-856 | AL119825, AW367632, AA333024, |
| | | | | | AA164770, N53725, AA984472, N44616, |
| | | | | | AF000423, AB026808, and D38522. |
| HHFOC79 | 175 | 1182276 | 1-2091 | 15-2105 | W37105, W72587, AI417917, N40695, |
| | | | | | N40709, AI750977, AA399093, AA528204, |
| | | | | | AI160861, AI167229, W56631, AA845109, |
| | | | | | AA450162, AA740816, AA708621, |
| | | | | | AA034924, AI610231, AI926222, |
| | | | | | AA600107, AA034932, AI569931, |
| | | | | | W79446, AA450099, AA405199, H99848, |
| | | | | | AI148368, AI755034, H13127, H21360, |
| | | | | | H45102, AI144154, AI022674, R48598, |
| | | | | | N24731, AI750978, H40009, N27945, |
| | | | | | R48134, H44414, M79188, R73380, |
| | | | | | H45412, AA375133, W56545, AI868381, |
| | | | | | H21461, AW015358, AA995764, H14443, |
| | | | | | H28019, R48457, H26214, W15232, |
| | | | | | AA405198, AA852302, AI865401, R11082, |
| | | | | | N27934, AA045985, W76150, R48700, |
| | | | | | H27127, AI082451, N28528, R48133, |
| | | | | | AA046015, AA358230, C17362, H27122, |
| | | | | | AA404366, AA699711, W37806, T30018, |
| | | | | | AA398203, R32099, AI870723, AA483606, |
| | | | | | AA570740, AA568204, AA502532, |
| | | | | | AW057716, AA491767, AA584756, |
| | | | | | AW089016, F11718, AA572813, |
| | | | | | AI755214, AI754567, AI815665, |
| | | | | | AA089756, AW163795, AI915081, |
| | | | | | AI754105, AW022934, AA447247, |
| | | | | | AI249688, AA832145, AI280266, |
| | | | | | AA604904, AI270476, AI080732, |
| | | | | | AA630854, AI432298, H27788, AA772906, |
| | | | | | AI380617, AA846046, AI038304, |
| | | | | | AI679221, AI141130, AW131356, |
| | | | | | AL079734, F16848, AL079894, AI431513, |
| | | | | | F35097, AA491955, AW188742, |
| | | | | | AW192599, AI569100, AW407632, |
| | | | | | AW194077, AI859438, AW157005, |
| | | | | | AI538491, AI623563, AL121657, |
| | | | | | AC007011, AC004655, AL049780, |
| | | | | | AC005015, AC004912, Z97055, |
| | | | | | AL009181, AL034429, Z98949, AC006538, |
| | | | | | AL023575, AL034420, AC007690, |
| | | | | | AC005081, AC002425, AC006449, |
| | | | | | AC004876, AC004797, AC005409, |
| | | | | | AC004491, AC004000, AC005231, |
| | | | | | AL049743, Z99755, U52112, AB023054, |
| | | | | | AC004929, AL035088, AL022727, |
| | | | | | AC006040, AC005578, Z93930, |
| | | | | | AL121754, AC004812, AP000014, |
| | | | | | AC005399, AL049636, AC007193, |
| | | | | | AC006530, AC008072, AC004084, |
| | | | | | AC005197, AL034549, AC005747, |
| | | | | | AC006441, AC004408, AL020997, |
| | | | | | AC003684, AF165926, AC005007, |
| | | | | | AC006211, AC005701, AL031273, |
| | | | | | AC004531, AC004216, L78810, |
| | | | | | AC005695, Z73417, Z82195, AC007637, |
| | | | | | AL049759, AL034417, AC004263, |
| | | | | | AL133445, AC005971, AC000353, |
| | | | | | AF200465, U91321, AL035420, |
| | | | | | AC005102, AC002300, U91318, |
| | | | | | AL096775, AL033524, AC005514, Z83822, |
| | | | | | AC002477, AL133216, AL032821, |
| | | | | | AF207550, Z82203, AL022333, AC005722, |
| | | | | | AL009172, AF109907, AC005940, |
| | | | | | AC005071, AC008044, AC003663, |
| | | | | | AC005920, AC007151, AC005752, |
| | | | | | AC006115, AL133448, AF088219, |
| | | | | | AC002070, AC005666, AP000511, |
| | | | | | AC004895, AC004675, AL050307, |
| | | | | | AL122020, AC003042, AC005815, |
| | | | | | AC006487, AJ003147, AC006965, Z77249, |
| | | | | | AL008718, AL022330, AC004770, |
| | | | | | AC007388, AC004967, AL035457, |
| | | | | | AC005280, AF111168, AC004914, |
| | | | | | AC006241, AP000501, AC003049, |
| | | | | | AC007792, AC004638, AC007263, |
| | | | | | AC005523, AC006946, AC007461, |
| | | | | | AC003009, AB003151, AC000115, |
| | | | | | AL034548, Z99716, AL078477, AC002351, |
| | | | | | AC002301, AL109627, AP000098, |
| | | | | | AC012085, U95739, AC005803, |
| | | | | | AL031291, AC003070, AC002492, |
| | | | | | AC004962, AC002378, AC005366, |
| | | | | | AC008372, AC005808, AC004051, |
| | | | | | U91323, AP000517, AP000697, AC004032, |
| | | | | | AC007225, AC007686, AC005486, |
| | | | | | AL031778, AC005620, AC004938, |
| | | | | | AC005921, AL132712, AC005829, |
| | | | | | AC005740, AC004659, AC005837, |
| | | | | | AC003010, AC005291, AL049539, |
| | | | | | AC004231, AC007298, AC006536, |
| | | | | | AC007425, AL022318, AC002470, |
| | | | | | AC003104, AC004910, AL109865, |
| | | | | | AL049761, AC005207, AL031681, Z98200, |
| | | | | | AL121748, AC005878, AC006120, |
| | | | | | U82668, AC004835, AC007055, |
| | | | | | AC004913, AL008725, AC005476, |
| | | | | | AC007344, AC004020, AL132777, |
| | | | | | AL021977, AC005017, AC002504, |
| | | | | | AC002310, AC005088, AC004844, |
| | | | | | Z85996, AL031680, AC005943, AL133371, |
| | | | | | AC005288, Z98051, AC002347, |
| | | | | | AC006974, AC004745, AC006065, |
| | | | | | Z98941, AL023877, AP000103, AF064858, |
| | | | | | AF015416, Z68869, AL022315, AC007688, |
| | | | | | AC004383, AC007376, AL109628, |
| | | | | | AL031602, AL049814, AF111167, |
| | | | | | AF001549, AP000474, AC002375, |
| | | | | | AL022323, AP000961, U95090, |
| | | | | | AC012384, L44140, AF196972, and |
| | | | | | AL109984. |
| HOGEQ43 | 176 | 1223485 | 1-3732 | 15-3746 | AW001408, AW025576, AI167306, |
| | | | | | AW183595, AW206547, AA421304, |
| | | | | | AI884557, N53420, AI961482, AI366803, |
| | | | | | AI471722, AI277353, AI208800, |
| | | | | | AI285232, AI923048, AI002657, |
| | | | | | AA905774, AW444453, AW072850, |
| | | | | | AI002663, AA917870, AI420232, Z40060, |
| | | | | | AA995040, Z44009, AA743874, T91698, |
| | | | | | T91710, AA421383, T77085, AI536628, |
| | | | | | AA768502, T92932, F07259, AA465719, |
| | | | | | F13268, AW197122, AI222859, T92460, |
| | | | | | T93049, R13318, AW385033, T92477, |
| | | | | | AI078087, T89796, AA780031, AI680633, |
| | | | | | T89430, AI572783, F03531, AA747975, |
| | | | | | AA465126, AA361777, R57124, AI417757, |
| | | | | | AA808475, AI805839, AA324494, N94713, |
| | | | | | AW384784, AA838146, AA971578, |
| | | | | | AI422164, AA835936, AB033082, |
| | | | | | AF001630, AF038189, AF132479, |
| | | | | | AF132480, and U61167. |
| HCECQ23 | 177 | 938398 | 1-796 | 15-810 | AI480182, AI500178, AI873131, |
| | | | | | AA322958, AA322718, AI936088, R85125, |
| | | | | | R90888, H05353, AA338672, H51247, |
| | | | | | R35934, AW139057, H05303, R49451, |
| | | | | | R42549, H29245, AI654790, AI638508, |
| | | | | | R51648, AW149807, R44423, AI458144, |
| | | | | | AI419465, F02105, AI499775, Z40525, |
| | | | | | F09051, R85080, H51217, AI569283, |
| | | | | | D29763, D64009, and D64010. |
| HTGAU79 | 178 | 1178621 | 1-1081 | 15-1095 | AA579641, AI149891, AI028588, |
| | | | | | AA659710, AI889233, AA461487, |
| | | | | | AA460132, AA682750, AA113277, |
| | | | | | AI753378, AA985248, AI421205, |
| | | | | | AI914588, AI493749, AA633392, |
| | | | | | AA936668, AA722409, AI424537, |
| | | | | | AA233726, AW268600, AA516077, |
| | | | | | AA483490, AW082930, AA074311, |
| | | | | | AI752615, AI989665, AA046575, T87841, |
| | | | | | AI087102, and AL031055. |
| HE9FI33 | 179 | 1156432 | 1-1550 | 15-1564 | AA010320, AA010384, and R01100. |
| HNHCP79 | 180 | 565781 | 1-288 | 15-302 | |
| HTLIY52 | 181 | 1194806 | 1-1338 | 15-1352 | AI827749, AI580407, AI819667, |
| | | | | | AI025487, AI223109, AI150036, |
| | | | | | AI024234, AW087713, T18864, AI479322, |
| | | | | | AA883975, AW341589, AA860213, |
| | | | | | AI831802, AA913074, AA608857, |
| | | | | | AI050685, AA860223, AA948538, and |
| | | | | | AI075930. |
| HRAED74 | 182 | 942527 | 1-691 | 15-705 | AC005940, L42810, S83194, AF117384, |
| | | | | | and AB023658. |
| HFKKN77 | 183 | 943757 | 1-719 | 15-733 | |
| HTEMU66 | 184 | 1205381 | 1-1077 | 15-1091 | AL039924, AL045794, AW013814, |
| | | | | | AL036630, T02921, AL044412, AL044364, |
| | | | | | T24119, T24112, AW450335, AL039476, |
| | | | | | D51250, AL039521, AL045341, |
| | | | | | AL039386, D80043, AL040992, |
| | | | | | AL039109, AL038531, AL037726, |
| | | | | | AL039629, AL039659, AL039625, |
| | | | | | AL039648, AL038837, AL039074, |
| | | | | | AL039566, AL039678, AL039108, |
| | | | | | AL039538, AL039564, AL039509, |
| | | | | | D80253, AL039156, H00069, AL039128, |
| | | | | | AL044407, AL036973, AL042909, |
| | | | | | AL045337, AL037051, AL045353, |
| | | | | | AL039423, D59787, AL039410, |
| | | | | | AL039150, AL038025, AL044530, |
| | | | | | AL039459, AL038821, D80219, |
| | | | | | AL036725, AI535983, AL043422, |
| | | | | | AL043445, D59275, AL043586, |
| | | | | | AL043423, D80240, AL043441, |
| | | | | | AL036650, T23947, D80210, D51423, |
| | | | | | AL036196, D80134, AL037639, |
| | | | | | AW451070, D59619, D80391, D80227, |
| | | | | | AL037615, D80193, AL036767, AI535783, |
| | | | | | D80196, AL039085, AL036117, |
| | | | | | AL042334, AW452756, R47228, |
| | | | | | AL037526, D80366, D59927, AL036238, |
| | | | | | AL036679, AL039504, AL037601, |
| | | | | | AL039842, AL036964, AL036733, |
| | | | | | AL037027, AL036158, AL036924, C14014, |
| | | | | | AL037054, D50995, AL036765, D80045, |
| | | | | | C75259, T23658, AL044413, T23659, |
| | | | | | AL037177, AL036998, AL038851, |
| | | | | | AW293068, AL036227, AL036418, |
| | | | | | AL037047, D59889, AL037643, C15076, |
| | | | | | D81026, AL036133, AL036163, C14227, |
| | | | | | C14389, D50979, AL037082, AL036167, |
| | | | | | AL037124, AL037679, AL036207, |
| | | | | | AL036132, AL037049, AL036191, |
| | | | | | AL037021, D80022, AL037600, |
| | | | | | AL036190, T11417, D59467, AL036139, |
| | | | | | D81030, D80038, T23656, AL036152, |
| | | | | | D58283, D80195, C14429, F13647, |
| | | | | | D80188, AL036900, D52291, T48598, |
| | | | | | T03269, D51799, D80168, D80522, |
| | | | | | AI557751, AL048425, D80378, |
| | | | | | AW451416, AL037178, AL043613, |
| | | | | | C14298, AL039555, D59502, AA514190, |
| | | | | | AL043585, D80164, D80166, D59859, |
| | | | | | D80212, AL037085, Z25782, Z21582, |
| | | | | | D80269, C14331, D59695, D80024, |
| | | | | | D57483, AA285331, AL036953, D59610, |
| | | | | | AL036808, AW450376, D80064, D58253, |
| | | | | | D80241, AL036174, AL037569, |
| | | | | | AL044178, D80949, AL036150, Z99396, |
| | | | | | D80268, D51060, AA305409, AW178893, |
| | | | | | D81111, D51079, H00072, D59627, |
| | | | | | AL036268, AL038043, N47620, D80251, |
| | | | | | D51022, AW177440, C14407, AW179328, |
| | | | | | AI910186, AW178775, AL044447, |
| | | | | | AW378532, AA305578, AW352158, |
| | | | | | D80248, AW377671, AI905856, |
| | | | | | AW369651, D51097, AW178762, |
| | | | | | AA514188, AL043840, AW177501, |
| | | | | | AW177511, D50981, AL037002, |
| | | | | | AW360834, AL037077, AA514186, |
| | | | | | D80133, AL039417, AW360811, C05695, |
| | | | | | AW352117, Z25783, AW135155, |
| | | | | | AW176467, AW375405, AW378540, |
| | | | | | AA809122, AW366296, AW360844, |
| | | | | | AW360817, AW375406, D80132, A85396, |
| | | | | | A25909, A85477, A44171, A86792, |
| | | | | | X68127, AR062871, A84772, A84776, |
| | | | | | A84773, A84775, A84774, AR037157, |
| | | | | | AR017907, AR062872, AR062873, |
| | | | | | AR067731, AR067732, A58522, A91750, |
| | | | | | A20702, A43189, A43188, A20700, |
| | | | | | AR036905, A10361, AR038762, A98767, |
| | | | | | A93963, A93964, A95052, A38214, |
| | | | | | I03343, AR043602, AR043603, AR043601, |
| | | | | | A95117, A95051, A18053, AR022240, |
| | | | | | A18050, AR054109, A23334, A75888, |
| | | | | | I70384, I56772, I95540, AR018924, |
| | | | | | A63067, A51047, A63064, AR031374, |
| | | | | | AR018923, A60111, A48774, A23633, |
| | | | | | A63072, AR007512, A49700, A48775, |
| | | | | | A23998, AR068507, AR068506, A81878, |
| | | | | | AR015960, I60241, I60242, AR000007, |
| | | | | | AR015961, A58521, I63120, A24783, |
| | | | | | A24782, AR020969, E12615, AR035193, |
| | | | | | A92133, E14304, A27396, AR027100, |
| | | | | | I28266, A49045, E16678, A82653, E16636, |
| | | | | | AR031375, A93016, A58524, A58523, |
| | | | | | I25027, I26929, E13740, I44515, I26928, |
| | | | | | I26930, I26927, A58525, I06859, |
| | | | | | AR000006, I49890, I44516, A58526, |
| | | | | | A91753, AJ244003, AR025207, I18371, |
| | | | | | E06034, AF156296, A13038, A29289, |
| | | | | | AR029417, AF156294, AR067733, |
| | | | | | AR029418, AR067734, AR028669, |
| | | | | | AR028668, AR028667, AR028670, |
| | | | | | AR017908, A68112, A68104, A98467, |
| | | | | | I62368, AR031488, I13521, I52048, |
| | | | | | I44531, A84746, A17115, AR028672, |
| | | | | | A18079, AR038066, I50882, I15353, |
| | | | | | A64081, I66495, I66494, I66498, I66497, |
| | | | | | I66496, I66486, I66487, A71440, A71435, |
| | | | | | I13349, A07699, E08322, I74623, A60109, |
| | | | | | A67220, AJ244004, U87250, I00081, |
| | | | | | A70040, AR028564, A83643, A98420, |
| | | | | | A98423, A98432, A98436, A98417, |
| | | | | | A98427, A83151, I01968, A13388, E00974, |
| | | | | | A02228, E00954, E00952, E00953, E00955, |
| | | | | | I08049, I43960, AR021440, E03165, |
| | | | | | E02221, E13364, A10360, E02679, E02104, |
| | | | | | E02098, A92666, E02001, E01718, E02003, |
| | | | | | E02102, E03550, A28163, E02100, E01997, |
| | | | | | A58998, E02291, E02292, E02293, E01999, |
| | | | | | E02396, E02327, E01563, E02431, E01693, |
| | | | | | E01696, A92668, AR005163, AR005154, |
| | | | | | AR005157, AR005160, I09250, AR005153, |
| | | | | | A92667, E01024, AR050583, AR050584, |
| | | | | | E02430, E01148, E12527, E01503, |
| | | | | | AR005165, E12523, E02432, A49701, |
| | | | | | A62009, E01216, I77211, A95096, I70974, |
| | | | | | I31847, I31848, AR060673, AR060676, |
| | | | | | A95106, A95105, A80476, A91965, |
| | | | | | E01324, I08638, A80474, A94048, A94061, |
| | | | | | A80477, AR035224, A80475, A94046, |
| | | | | | A94054, I63560, AR031529, A49428, |
| | | | | | I63561, I63563, and E16036. |
| HWAGU62 | 185 | 1206797 | 1-2192 | 15-2206 | AI913535, AI762854, AI758705, |
| | | | | | AI677912, AI740876, AI825702, |
| | | | | | AA412665, AI800271, AI525869, |
| | | | | | AA883055, AI823434, R77865, |
| | | | | | AW204604, AA491093, AA134753, |
| | | | | | AA598723, AA845774, R73497, |
| | | | | | AA134752, AA993841, R73498, D62016, |
| | | | | | AI332677, AI535824, AI598069, |
| | | | | | AI535821, N68128, R77771, AA761684, |
| | | | | | W28537, AW370473, AW370408, |
| | | | | | AI758562, AI754802, AA293681, |
| | | | | | AA075272, AI687944, AI916337, |
| | | | | | AI633125, AW198090, AI620056, |
| | | | | | AI608882, AI479292, AI890223, |
| | | | | | AI859932, AW151893, AW152182, |
| | | | | | AW190194, AI802542, AI625079, |
| | | | | | AI677796, AI554821, AI701097, |
| | | | | | AW409867, AA830709, AI687362, |
| | | | | | AI584130, AW073677, AW083572, |
| | | | | | AI819326, AA811202, AI538564, |
| | | | | | AI571439, AW169604, AW020619, |
| | | | | | AI653979, AI702073, AA743430, |
| | | | | | AI673140, AI433157, AW157096, |
| | | | | | AA937566, AI049733, AI636588, |
| | | | | | AW195169, AI241744, AI635032, |
| | | | | | AW166870, AI445025, AI567128, |
| | | | | | AI973152, AW002362, AI637584, |
| | | | | | AI469532, AI635016, AI247293, |
| | | | | | AI619662, AW083374, AI564719, |
| | | | | | AW129722, AI952471, AI811644, |
| | | | | | AI620003, AI357940, AI376425, |
| | | | | | AW104724, AC007785, AF100752, |
| | | | | | X78627, AF124435, AL133049, AF222801, |
| | | | | | X59812, A15345, X60769, AR050959, |
| | | | | | S36676, D44497, AL137550, Z82022, |
| | | | | | AL137476, A60092, A60094, AF031572, |
| | | | | | AC006288, X63162, AF084644, AF084645, |
| | | | | | A27171, A52184, L35261, AR038854, |
| | | | | | AF115410, AL137560, AF124396, |
| | | | | | AL136884, AF111849, U49434, U95114, |
| | | | | | X68497, X52220, X98066, U97675, |
| | | | | | AL023657, A83556, AL133607, AF082324, |
| | | | | | and X68249. |
| HFPFB39 | 186 | 1198036 | 1-2090 | 15-2104 | AI631883, AI767614, AA018867, |
| | | | | | AA019175, R56792, AI497937, N95592, |
| | | | | | R44001, AW271411, R56793, Z38315, and |
| | | | | | Z42023. |
| HPMFI38 | 187 | 1165993 | 1-975 | 15-989 | AI765950, N54154, H12876, R93383, |
| | | | | | R56658, R16970, AW205252, R25871, |
| | | | | | AA886432, R93384, R16914, and N58678. |
| HBXDJ07 | 188 | 946830 | 1-1470 | 15-1484 | H11405, R55569, N27906, H20863, |
| | | | | | N25140, and U27708. |
| HOFMS43 | 189 | 1152417 | 1-1065 | 15-1079 | |
| HOVCO14 | 190 | 1091087 | 1-592 | 15-606 | AI701529, AA994711, AI192036, and |
| | | | | | AC007198. |
| HTEPE35 | 191 | 1105272 | 1-825 | 15-839 | AI935040, AA861064, AA933697, |
| | | | | | AA707583, AA872105, AA398866, |
| | | | | | AA609626, AA620685, AA435866, |
| | | | | | AA812556, AA781805, AA993718, |
| | | | | | AF012362, AI217888, and AA824315. |
| HE8UA52 | 192 | 1229490 | 1-3408 | 15-3422 | AI742521, AW274710, AA723595, |
| | | | | | AW365665, AI141346, AW043776, |
| | | | | | AI469940, AI378321, AI079805, |
| | | | | | AI168469, AI142001, AA772045, |
| | | | | | AI337483, AA478634, AI051463, |
| | | | | | AA912545, AW149092, AI249877, |
| | | | | | AI583065, AI873923, AL040011, |
| | | | | | AI700159, AI805638, AA427373, |
| | | | | | AI560683, AI287793, N42321, AI633125, |
| | | | | | AI499325, AW170635, AW151714, |
| | | | | | AI587114, AI872804, AW087455, |
| | | | | | AI631216, AI669459, N29277, AI921281, |
| | | | | | AI916419, AI538850, AI476478, |
| | | | | | AI242248, AW193231, AW162194, |
| | | | | | AI677646, AA580663, AW192228, |
| | | | | | AI677796, AI434038, AI494201, |
| | | | | | AL039753, AI583308, AW079859, |
| | | | | | AI357599, AI473536, AW152182, |
| | | | | | AW021373, AI884318, AI655841, |
| | | | | | AI241744, N71180, AI468959, AI538564, |
| | | | | | AI564723, AI685798, AI340519, |
| | | | | | AW081311, AW169653, AI863382, |
| | | | | | AI619691, AI432030, AL134830, |
| | | | | | AI620643, AI915291, N36182, AW263804, |
| | | | | | AI590423, AW191844, AA464646, |
| | | | | | AI636457, AI871923, AI631264, |
| | | | | | AI345688, AI933992, AL120526, |
| | | | | | AI690813, AL047422, AI868204, |
| | | | | | AI282307, AW243886, AW149311, |
| | | | | | AI718707, AI554343, AI446373, |
| | | | | | AW265004, AI344817, AI635216, |
| | | | | | AA019328, AW084117, AI687295, |
| | | | | | AI345224, AI679098, AW081322, |
| | | | | | AW104141, AI344935, T99953, |
| | | | | | AA502794, N22406, AI538716, AI539771, |
| | | | | | AI673710, AI624963, AI311892, |
| | | | | | AI579901, AI307736, AI472536, |
| | | | | | AW085673, AI611743, AI491710, |
| | | | | | AI249962, AW189270, AI281867, |
| | | | | | AW059828, N75771, AI635478, |
| | | | | | AA494167, AI684305, AI798456, |
| | | | | | AI554186, AI499131, AW105383, |
| | | | | | AI468930, AW089572, AW084097, |
| | | | | | AI648567, AI610690, AI890954, |
| | | | | | AI627893, AI932794, AL039858, |
| | | | | | AI653979, AW166182, AI890907, |
| | | | | | AW130134, AI951868, AW129916, |
| | | | | | AI670009, AI520862, AI310575, |
| | | | | | AW163554, AI570989, AI445663, |
| | | | | | AA812110, AL042628, AI499947, |
| | | | | | AI702073, AI569579, AI565031, |
| | | | | | AW102864, AA468418, AA835801, |
| | | | | | AI591387, AI340533, AI439527, |
| | | | | | AI890183, AI583085, AI924911, |
| | | | | | AI280732, AA641818, AI249946, |
| | | | | | AW020397, AI537837, AI566003, |
| | | | | | AI690748, AI698391, AI554821, |
| | | | | | AW058233, AI633000, AI623682, |
| | | | | | AI499393, AI801112, AW020693, |
| | | | | | AL037602, H41759, AI433157, AI620859, |
| | | | | | AW079119, AW130681, AI349957, |
| | | | | | AI922707, N29481, AI889189, AL040243, |
| | | | | | AW172723, AI889168, AI440263, |
| | | | | | AI700305, AI340982, AW169527, |
| | | | | | AI345005, AI357316, AI348870, H89138, |
| | | | | | AI340627, AI469505, AI274785, |
| | | | | | AW163834, AL047344, AW023338, |
| | | | | | AL119748, AL046618, AL079963, |
| | | | | | AW129929, AW104724, AI470651, |
| | | | | | AI582912, AI453328, AA833760, |
| | | | | | AL037582, AI679211, AW237857, |
| | | | | | AI445829, AI539707, AI637584, |
| | | | | | AI828705, AI340603, AI889147, |
| | | | | | AI659334, AW105431, AI288285, |
| | | | | | AI564311, AI678496, AI862142, |
| | | | | | AI567612, AW192701, AW083804, |
| | | | | | AI439478, AI096534, AW192042, |
| | | | | | AW152459, AI621362, AA635382, |
| | | | | | AI866465, AI689420, AI918554, |
| | | | | | AI273179, AI815232, AW302924, |
| | | | | | AI251221, AW198090, A21103, |
| | | | | | AL122045, AL122111, AL137529, |
| | | | | | AF183393, AL110225, AF061981, |
| | | | | | AL050149, A18777, I48978, I89947, |
| | | | | | A08913, A08910, AR038854, A08909, |
| | | | | | AL117460, AL049452, A08912, U49434, |
| | | | | | A08908, I26207, S76508, I89931, |
| | | | | | AL080126, I89934, I89944, A15345, |
| | | | | | I49625, A08916, A58524, A58523, |
| | | | | | AF090900, X63410, AF113677, L13297, |
| | | | | | S77771, I68732, A18788, AF026816, |
| | | | | | AF118094, X70685, AF090903, AJ003118, |
| | | | | | D83032, S61953, AL133558, X80340, |
| | | | | | AL137533, AL137488, E01573, E02319, |
| | | | | | A08907, AL049464, L19437, AL049283, |
| | | | | | Y10936, AL137523, A90832, AL137463, |
| | | | | | AL110171, AL137526, AL050277, |
| | | | | | A83556, I46765, AF079763, L31396, |
| | | | | | AL080148, L31397, X57961, E12747, |
| | | | | | AR068751, E05822, AL133640, AL049314, |
| | | | | | AJ242859, AF159615, M96857, AF000301, |
| | | | | | I09499, U80742, AF090901, AB029065, |
| | | | | | AF113694, Y10080, AL122049, AF118064, |
| | | | | | AF118070, AF107847, AL133098, X52128, |
| | | | | | AL133557, AL133016, AL133014, |
| | | | | | Y11587, X83544, AL122106, Z82022, |
| | | | | | AL137648, AF153205, Z37987, AL050116, |
| | | | | | AF146568, A52563, A12297, AL117435, |
| | | | | | AF085809, AJ006417, X98834, AL133568, |
| | | | | | AL122110, AF090943, Y11254, AL080159, |
| | | | | | AL137560, M86826, AF017790, |
| | | | | | AL080127, AL133113, AF125948, I03321, |
| | | | | | U68387, AF090896, AL133606, AL080163, |
| | | | | | AF032666, AF057300, AF057299, A23630, |
| | | | | | AL137550, AF091084, AF100781, |
| | | | | | AB016226, AF100931, Y16645, U00763, |
| | | | | | AF215669, AJ000937, X62580, I33392, |
| | | | | | AF051325, AL137538, X84990, AL122098, |
| | | | | | AB007812, AL117457, AL049466, |
| | | | | | AL137558, AL133565, AL137479, |
| | | | | | AL049347, I00734, AL110159, AL049465, |
| | | | | | AL137276, Y10655, S75997, AL049996, |
| | | | | | AF113019, AL049938, AF067728, X79812, |
| | | | | | A65341, AL122100, AL050108, |
| | | | | | AL137656, AF139986, AF137367, |
| | | | | | AL110222, AL133112, U72620, S68736, |
| | | | | | AL137292, I41145, AL080086, AL133104, |
| | | | | | AF003737, AF017437, X87582, AL122050, |
| | | | | | AL117583, AL117416, U35146, |
| | | | | | AL117585, AL080158, X92070, S69510, |
| | | | | | E08631, U00686, AF113676, AF040751, |
| | | | | | AL122118, U35846, AL137521, AF106862, |
| | | | | | AR054987, AL133665, Z97214, |
| | | | | | AR013797, U68233, AF113690, I92592, |
| | | | | | AL137283, AL049300, AL050024, |
| | | | | | AL110196, AL049430, A76335, AF118090, |
| | | | | | AF106827, A49139, I17767, A93350, |
| | | | | | Y09972, A07647, A45787, AL136842, |
| | | | | | AL050146, AF177401, AL117394, |
| | | | | | AL122093, AF106657, AL050092, |
| | | | | | AL133031, AF079765, X63574, AL137480, |
| | | | | | AF061573, AJ012755, X83508, AL110218, |
| | | | | | A08911, I48979, AL080124, AR020905, |
| | | | | | AF126247, AF162270, U67958, A77033, |
| | | | | | A77035, AF113699, AF158248, AF111849, |
| | | | | | AF026124, I80064, E01314, AL110221, |
| | | | | | AL137712, AL137273, AL050138, and |
| | | | | | AL137641. |
| HOUBE50 | 193 | 1090776 | 1-1175 | 15-1189 | AL120487, AA578623, N85038, |
| | | | | | AB033086, and AB023168. |
| HAJAV28 | 194 | 1165229 | 1-1587 | 15-1601 | AA913364, AW027373, AW305275, |
| | | | | | AI799031, AA588138, AA775450, |
| | | | | | AW117480, AW190848, AA411334, |
| | | | | | AA866178, W61038, AA411335, |
| | | | | | AA775769, AA769134, N30274, AI493881, |
| | | | | | AA075643, AA614747, AA627544, |
| | | | | | AI147666, AI025647, N30309, AA075644, |
| | | | | | AA812101, N94919, AW339918, |
| | | | | | AI140386, AI138196, AA868924, |
| | | | | | AA284960, AI554835, AI343592, |
| | | | | | AI128292, AI143201, AI017993, |
| | | | | | AI492556, AI347094, N42630, W72001, |
| | | | | | N20511, AI679099, AI933338, AA040263, |
| | | | | | AI268560, W69402, AI354734, T32745, |
| | | | | | N29505, AA872581, AI017992, N41996, |
| | | | | | AA863176, AA719956, F28362, |
| | | | | | AA448442, AI679673, AI142803, |
| | | | | | AA732322, AA993672, AA444022, |
| | | | | | AI624135, AA846235, AI004213, W44778, |
| | | | | | W44314, AA305351, AI285067, AI304774, |
| | | | | | AA448307, W65308, AW274816, W37097, |
| | | | | | AI475118, N25416, D79265, AI872626, |
| | | | | | AI186604, AA682603, AA285117, |
| | | | | | AI149185, AI339799, AI344717, |
| | | | | | AA996037, AA444000, AI128110, |
| | | | | | AA557809, H13966, AA922743, |
| | | | | | AA515842, F37123, AA732278, W65338, |
| | | | | | N56641, AI239957, AI580506, AA989130, |
| | | | | | R21057, W45686, R96887, AA721150, |
| | | | | | AA034909, F09166, H12989, N26843, |
| | | | | | N57447, W69363, W19542, AW183468, |
| | | | | | AI685763, R96888, C04314, H87003, |
| | | | | | AI719584, R24370, T35889, AA081676, |
| | | | | | T34115, N40568, AW023063, N63592, |
| | | | | | AA010732, T35834, AW089136, Z42311, |
| | | | | | F11505, W76570, T35841, AA913531, |
| | | | | | T30076, AI366940, AA505347, T30517, |
| | | | | | H05630, H27007, Z42248, F09167, |
| | | | | | H87002, W56871, T36163, AA040400, |
| | | | | | W19619, AA721261, AA649338, F34780, |
| | | | | | T35871, H13965, R46237, T35833, |
| | | | | | AA034976, AA863208, AA913094, |
| | | | | | AI274646, N63619, AA890331, AA082031, |
| | | | | | F05477, AI564372, AA603299, AA322616, |
| | | | | | AA603386, R27044, Z38484, R27043, |
| | | | | | R27029, F01840, AI859366, R27028, |
| | | | | | AA748381, F01739, AA355325, H53598, |
| | | | | | AI859362, N46608, AA339209, and |
| | | | | | AF190797. |
| HAQBZ89 | 195 | 1083554 | 1-1403 | 15-1417 | AI436552, AW071796, AI299053, |
| | | | | | AI334145, AI613263, AI921361, |
| | | | | | AI161282, AI018067, AI984679, |
| | | | | | AI934889, W52097, AI281829, AA236375, |
| | | | | | AA121294, AI342850, W16450, |
| | | | | | AA729045, AA608803, AW135827, |
| | | | | | N78654, AW193167, AI689644, N46334, |
| | | | | | AI159772, AA456075, AA130122, N63941, |
| | | | | | N58535, AL042537, AA367722, |
| | | | | | AA969946, AI432541, AA829498, |
| | | | | | AA781924, AW304842, AI299054, |
| | | | | | T69736, AW194058, AW170746, |
| | | | | | AI382899, AA862441, AA257021, |
| | | | | | AA345125, AI049756, AI983846, |
| | | | | | AI129698, T70395, AA130159, AA455578, |
| | | | | | AA833560, AW351523, AA451639, |
| | | | | | AI205015, and AW512516. |
| HELHF07 | 196 | 949067 | 1-327 | 15-341 | AC073669, AC074220, AC074220, and |
| | | | | | AC023605. |
| HE9QQ22 | 197 | 1127726 | 1-748 | 15-762 | N90644, T72234, R83190, AA010242, |
| | | | | | N90655, N90629, N94219, N65959, |
| | | | | | R83191, D50995, D80164, C15076, |
| | | | | | C14014, D59502, D80247, D59275, |
| | | | | | D80195, C14389, D81026, AA305409, |
| | | | | | D59467, D80227, D50979, D80269, |
| | | | | | D51799, D80022, D80166, D58283, |
| | | | | | D80193, D59619, D59859, D80210, |
| | | | | | D80391, D80240, D80045, C14331, |
| | | | | | D59787, AA514188, D51423, D80253, |
| | | | | | D80043, AA305578, D81030, D80188, |
| | | | | | D80439, D51060, D80038, D80212, |
| | | | | | D80196, D80248, D80219, D80366, |
| | | | | | D51022, AA514186, D80522, D59927, |
| | | | | | D80302, D80024, D51103, D57483, |
| | | | | | D59610, D80378, D80133, D59889, |
| | | | | | AW360811, D80268, AW177440, D80251, |
| | | | | | D80241, C14429, AW178893, AW377671, |
| | | | | | AW375405, D80157, T03269, AW178906, |
| | | | | | D51759, AW366296, AW179328, |
| | | | | | AW360844, AW360817, C75259, |
| | | | | | AW375406, AW378534, AW179332, |
| | | | | | AW377672, AW179023, AW178905, |
| | | | | | D59373, C05695, AW378528, AW178762, |
| | | | | | C06015, AW378532, AW176467, |
| | | | | | AW177501, AW177511, T48593, D59695, |
| | | | | | AW352171, AW377676, D59627, |
| | | | | | AW352170, AW177731, D80132, |
| | | | | | AW178907, AW179019, AW179024, |
| | | | | | D51250, AW178983, D80134, AW360841, |
| | | | | | D59653, AW177505, H67854, AW352120, |
| | | | | | AW179020, AW178775, D58253, |
| | | | | | AW178909, AW367967, AW177456, |
| | | | | | AW369651, AW179329, AW178980, |
| | | | | | AW178914, AW178774, AW177733, |
| | | | | | AW178908, AW178754, AW179018, |
| | | | | | AW352158, AW179009, D45260, |
| | | | | | AW352117, AI525923, D81111, |
| | | | | | AA809122, AW360834, C03092, D52291, |
| | | | | | AW179004, AW367950, AW179012, |
| | | | | | D51079, AW378543, AW378525, |
| | | | | | AW378540, AW352163, D59503, |
| | | | | | AW177728, D59551, H67866, T03116, |
| | | | | | D80949, D80258, D80168, T11417, |
| | | | | | AW352174, AW178781, AW178911, |
| | | | | | AI535686, AW177722, F13647, D59317, |
| | | | | | AI910186, AW178986, T74930, AI905856, |
| | | | | | D58246, C14298, AI525917, C14077, |
| | | | | | C14227, D80064, D80014, C14407, |
| | | | | | D51221, C14973, C14344, AW378533, |
| | | | | | AI535850, AW177734, AI525925, |
| | | | | | AI525920, D59474, D60010, AW177508, |
| | | | | | AA514184, D51213, D60214, AI525227, |
| | | | | | AI557774, D58101, AW177723, |
| | | | | | AW177497, C14957, C14046, Z21582, |
| | | | | | AI525242, AI525235, T03048, D45273, |
| | | | | | AI525237, AI525215, AI525912, |
| | | | | | AA285331, AW378542, AI557751, |
| | | | | | AW378539, C16955, D51053, C05763, |
| | | | | | Z33452, T02974, D31458, AI525222, |
| | | | | | C13958, AW360855, D51097, Z30160, |
| | | | | | T02868, H67858, D38100, AB002584, |
| | | | | | AR018138, AB028859, AJ132110, A84916, |
| | | | | | A82595, A62300, A62298, AR008278, |
| | | | | | AF058696, AB002449, AR060385, |
| | | | | | X67155, Y17188, A94995, D26022, |
| | | | | | Y12724, A25909, I50126, I50132, I50128, |
| | | | | | I50133, A67220, D89785, A78862, |
| | | | | | D34614, AR008443, AR066488, |
| | | | | | AR016514, AR060138, A45456, A26615, |
| | | | | | AR052274, D88547, Y09669, A43192, |
| | | | | | A43190, AR038669, I14842, AR066487, |
| | | | | | X82626, A30438, I82448, AR016808, |
| | | | | | AR054175, D50010, Y17187, AR025207, |
| | | | | | A63261, AR008277, AR008281, |
| | | | | | AR066490, AR008408, AR062872, |
| | | | | | A70867, I18367, AR016691, AR016690, |
| | | | | | U46128, I79511, D13509, A64136, |
| | | | | | A68321, AR060133, X68127, AB012117, |
| | | | | | AF123263, AR032065, U79457, |
| | | | | | AR060382, Z82022, A63887, and |
| | | | | | AR008382. |
| HSDSB06 | 198 | 1128280 | 1-2674 | 15-2688 | AI766068, AW009631, AI817090, |
| | | | | | AI765056, AA127727, AW069132, |
| | | | | | AI372853, AA877550, AI432584, |
| | | | | | AI129942, AA610281, AA102362, |
| | | | | | AA625117, AA948383, AA430522, |
| | | | | | AA447454, AW194550, AI635683, |
| | | | | | AA532394, AA446651, AA724535, |
| | | | | | AI220147, AW263019, AA430607, |
| | | | | | AA019158, AI752984, AI198643, |
| | | | | | AW389353, AA045561, AA516463, |
| | | | | | AW197881, AA186967, R67323, H86071, |
| | | | | | H67029, AA588072, C01179, AI457685, |
| | | | | | H22246, H12434, AW378928, H12433, |
| | | | | | AW050669, H68111, AA768085, |
| | | | | | AA054561, R33871, R66487, AA054621, |
| | | | | | AA478635, N55248, AA359925, |
| | | | | | AA385529, R33870, W68645, AA961423, |
| | | | | | AW002948, AI802284, AA377365, |
| | | | | | D31590, AI742590, AW275740, AI819328, |
| | | | | | AL133047, D89677, AF003234, and |
| | | | | | AW517631. |
| HACAD35 | 199 | 949199 | 1-1460 | 15-1474 | AI817458, AI810494, AA442536, |
| | | | | | AI271432, AA228126, AA227978, |
| | | | | | AA687616, AW316554, AW351633, |
| | | | | | D62849, AA346825, AW262553, |
| | | | | | AC007363, and AC007363. |
| HEQAP17 | 200 | 949358 | 1-807 | 15-821 | AI131555, AI769466, AA215577, |
| | | | | | AW190975, AA258335, AA258499, |
| | | | | | AL044652, S63848, Y17793, and A49045. |
| HMTBB17 | 201 | 1128589 | 1-462 | 15-476 | AA582539, AI963340, AI097093, |
| | | | | | AA286856, AI761614, AI149781, |
| | | | | | AI460219, AI032670, AI636161, |
| | | | | | AI819154, AI089302, H12042, AI811219, |
| | | | | | H05308, T95010, AA836993, AW271462, |
| | | | | | R37000, AI001803, AA904906, AA743196, |
| | | | | | AI015200, AA453607, F05000, AA578803, |
| | | | | | AI241466, AI033193, AA330970, F03322, |
| | | | | | F01968, AA037601, T75492, N47542, |
| | | | | | AW183219, AI288171, AA054759, |
| | | | | | F01965, AA651907, AL122084, and |
| | | | | | AL049611. |
| HKGDE58 | 202 | 1129137 | 1-1325 | 15-1339 | AW271462, AA582539, AI963340, |
| | | | | | AI097093, AI460219, AA286856, |
| | | | | | AI761614, AI149781, AA448686, |
| | | | | | AI032670, AI819154, AI089302, |
| | | | | | AI636161, H12042, AI811219, AA287162, |
| | | | | | AA836993, T95010, AI001803, AA904906, |
| | | | | | AA743196, AI015200, R37000, H05308, |
| | | | | | AA453607, F05000, AA578803, AI241466, |
| | | | | | AI033193, F03322, AA037601, AA330970, |
| | | | | | F01968, R13858, T75535, H12041, T75492, |
| | | | | | AA053290, Z46111, F07044, T94956, |
| | | | | | H05358, N47542, AW183219, AA454139, |
| | | | | | F05720, AI288171, AA651907, AA054759, |
| | | | | | F01965, F05717, AL122084, and |
| | | | | | AL049611. |
| HCHMW40 | 203 | 1144323 | 1-941 | 15-955 | AI732539, AI791495, AI791325, |
| | | | | | AA709067, AW082062, AI791964, |
| | | | | | AI732667, AA505923, AW057561, |
| | | | | | AI909857, AI909862, AA601601, |
| | | | | | AI909853, AW082594, AI812032, |
| | | | | | AI310332, AI610362, AI627880, |
| | | | | | AW403717, AA427700, AI687065, |
| | | | | | AW151136, AI783504, AW071417, |
| | | | | | AI446373, AI280670, AI886022, |
| | | | | | AI345253, AI345677, AW189415, |
| | | | | | AI800453, AI284131, AI285826, |
| | | | | | AW051088, AW022682, AL134999, |
| | | | | | AI280732, AI680162, AW168485, |
| | | | | | AI610645, AL079963, AI680498, |
| | | | | | AI805688, AI886181, AL040241, |
| | | | | | AI312428, AW020095, AI537677, |
| | | | | | AI498579, AI400725, AI866741, |
| | | | | | AI251221, AI932915, AI589947, |
| | | | | | AI343059, AI349933, AL119863, |
| | | | | | AL036548, AI345608, AI690410, |
| | | | | | AI571909, AI478123, AI335426, |
| | | | | | AI348777, AL041772, AW274192, |
| | | | | | AI590686, AI869377, AI364788, |
| | | | | | AL036638, AI310606, AW301344, |
| | | | | | AI568765, AI922901, AI345471, |
| | | | | | AI366992, AI863321, AI336575, |
| | | | | | AI950877, AI334450, AL120853, |
| | | | | | AI932794, AL110306, AI929108, |
| | | | | | AA908294, AA225339, AI608936, |
| | | | | | AI345746, AI251205, AW081255, |
| | | | | | AL045266, AW088134, AI824576, |
| | | | | | AI280661, AI659795, AI537617, |
| | | | | | AI520809, AI812015, AI569309, |
| | | | | | AI828568, AW087915, AI434741, |
| | | | | | AI648502, AI919107, AI352497, |
| | | | | | AI678357, AI888944, AI308035, |
| | | | | | AI886123, AW198075, AI174394, |
| | | | | | AI933589, AI686552, AW168709, |
| | | | | | AI587606, AI783861, AI468872, |
| | | | | | AW083778, AW163823, AW084219, |
| | | | | | AW103886, AI952920, AI955866, |
| | | | | | AI628217, AI933785, AI697324, N80094, |
| | | | | | AI633419, AI554218, AW151785, |
| | | | | | AI963216, AI445165, AI590120, |
| | | | | | AI431909, AI866002, AI829327, |
| | | | | | AW268302, AI433976, AW168373, |
| | | | | | AW149227, AL119791, AI282326, |
| | | | | | AI828731, AW302973, AI499463, |
| | | | | | AW079159, AI251830, AI619716, |
| | | | | | AW268060, AI288285, AW072719, |
| | | | | | AI539028, AW023590, AA493923, |
| | | | | | AI702019, AI744256, AI432736, |
| | | | | | AW148716, AW168031, AI648684, |
| | | | | | AI612759, AW152469, AI249962, |
| | | | | | AW089179, AI628316, AW151729, |
| | | | | | AI867042, AI696819, AI566630, |
| | | | | | AI619754, AI623682, AW163834, |
| | | | | | AI699011, AW088903, AW151714, |
| | | | | | AI919345, AW129230, AI698401, |
| | | | | | AI922577, AI249877, AI471361, |
| | | | | | AW088899, AW148356, AI366549, |
| | | | | | AI636719, AI539153, AI073952, |
| | | | | | AL036214, AI539771, AI916419, |
| | | | | | AI439762, AI431424, AI866608, |
| | | | | | AI349645, AI611743, AI800433, |
| | | | | | AW268220, AI689175, AW083804, |
| | | | | | AI590423, AI886192, AI888621, |
| | | | | | AI696626, AI589993, AW059713, |
| | | | | | AI365256, AI271796, AI431408, |
| | | | | | AW167882, AI348897, AI537515, |
| | | | | | AW029611, AI801213, AI863382, |
| | | | | | AI802654, AI783997, AI620639, |
| | | | | | AI310575, AW080135, AI805769, |
| | | | | | AL036396, AI340627, AI791396, F34698, |
| | | | | | AI493559, AI285431, AI340533, |
| | | | | | AI089970, AI564749, AI308032, |
| | | | | | AI800138, AW087445, AI610557, |
| | | | | | AI348854, AW087938, AI343091, |
| | | | | | AI344785, AI889953, AI680457, |
| | | | | | AI921386, AI362580, AW190042, |
| | | | | | AL036718, AI383919, AI886124, |
| | | | | | AI250663, AI824375, AA640779, |
| | | | | | AI285732, Z82022, AF111112, E03348, |
| | | | | | E04233, AL137521, AJ242859, AL133093, |
| | | | | | I89947, I48978, A08913, X87582, |
| | | | | | AL080127, A08916, AL117435, U91329, |
| | | | | | AL080060, I89931, AL133016, A08910, |
| | | | | | I49625, A08909, I26207, AL050024, |
| | | | | | X84990, A45787, X53587, AL050138, |
| | | | | | A03736, AF113690, Y11587, AF090900, |
| | | | | | AF008439, A93016, AL137556, E05822, |
| | | | | | AL080124, AF078844, AL137538, U96683, |
| | | | | | A08912, I00734, U88966, AF162270, |
| | | | | | I42402, E00617, E00717, E00778, |
| | | | | | AL133077, I48979, AR038969, AL137526, |
| | | | | | AF090943, AR059958, AL133557, |
| | | | | | AF113691, AL137463, AL122121, |
| | | | | | AF067790, AR038854, AL110196, |
| | | | | | AL080159, AL049382, AL049314, |
| | | | | | AF183393, AJ238278, AL117585, |
| | | | | | AL133075, AF090903, Y14314, AL050149, |
| | | | | | U80742, X65873, AJ012755, AL110280, |
| | | | | | AL137476, AF090934, AF118094, I09360, |
| | | | | | L19437, AL080074, AL133640, E15569, |
| | | | | | AF153205, AF017152, AL080137, |
| | | | | | AL137527, X96540, AF081197, AL049466, |
| | | | | | AF104032, S68736, A93350, AL050277, |
| | | | | | AL137550, AR000496, AL049430, |
| | | | | | U39656, AL137523, AF026124, AL050393, |
| | | | | | X82434, AF113689, AF113699, AF132676, |
| | | | | | X70685, AL137271, AF061836, AF111851, |
| | | | | | L30117, S78214, AL110221, Y09972, |
| | | | | | AL117440, AL133014, AF146568, |
| | | | | | AL122093, A12297, X93495, AJ006417, |
| | | | | | S61953, AR011880, AF113694, AF113019, |
| | | | | | U67958, AF113676, AL137533, AF158248, |
| | | | | | AL133113, AL133565, U00763, U72620, |
| | | | | | AL122049, AF118064, A90832, A07647, |
| | | | | | AF118070, AL122050, AL133098, |
| | | | | | AL122098, AL096744, AL050146, |
| | | | | | AL133568, AF090896, U42766, AF106862, |
| | | | | | I03321, I33392, E02349, AL050092, |
| | | | | | AL133560, AF097996, AF087943, |
| | | | | | AF061573, AL117460, E07108, AF177401, |
| | | | | | AL137273, AF026816, AL133606, |
| | | | | | AB019565, AL122110, AF091084, |
| | | | | | AL133067, AF067728, A65341, A77033, |
| | | | | | A77035, AL117583, AL049464, |
| | | | | | AL117457, AF125948, AF185576, U78525, |
| | | | | | AF090901, U35846, X72889, AF119337, |
| | | | | | AL133104, AF017437, AF113677, Y16645, |
| | | | | | AL049452, AF113013, AF125949, |
| | | | | | AF079765, AL117432, AF003737, |
| | | | | | AL049300, AL137557, Y11254, AJ000937, |
| | | | | | AL133080, AL137560, Z72491, M30514, |
| | | | | | U58996, AL137648, AL137459, |
| | | | | | AL050116, L31396, U68387, AL050108, |
| | | | | | AL110225, AL133072, L31397, AL117394, |
| | | | | | X63574, AF057300, AF057299, X98834, |
| | | | | | AF061943, AF081195, AL122123, E08263, |
| | | | | | E08264, E07361, A58524, A58523, |
| | | | | | AL137478, AL133645, AF061795, |
| | | | | | AF151685, A18777, AL137480, Z37987, |
| | | | | | E08631, E02221, AL049283, AF079763, |
| | | | | | AF111849, AL023657, AF030513, Y07905, |
| | | | | | E06743, AL050172, AL117649, and |
| | | | | | AL137294. |
| HE8QZ34 | 204 | 1143411 | 1-1873 | 15-1887 | AI346431, AA600828, AI654068, |
| | | | | | AI627476, AI692275, AI417541, |
| | | | | | AI033899, AA127745, AI634873, |
| | | | | | AI653646, AI564494, AI635599, |
| | | | | | AI434505, AA127671, AI818370, |
| | | | | | AI912908, AI311461, AI914324, |
| | | | | | AI371325, AA622400, AA225468, |
| | | | | | AA811711, AA593299, AA633708, |
| | | | | | AA768315, AW236744, W28575, |
| | | | | | AA210809, AW071534, AA565871, |
| | | | | | AI371817, AA287455, AA210690, |
| | | | | | AA225526, W00592, AA085933, N68915, |
| | | | | | AA908320, AA281938, AA112126, |
| | | | | | R35313, AA225852, AI277214, AA465202, |
| | | | | | AA580581, R86156, W19885, AA455978, |
| | | | | | AA286753, AW020244, AA636108, |
| | | | | | AW405566, AA452896, AI863445, |
| | | | | | AI055868, AA594111, AA772109, T06553, |
| | | | | | AW195517, AA385668, AI673762, |
| | | | | | AA384297, AA730967, Z41832, |
| | | | | | AW338426, R61806, H25863, AA370592, |
| | | | | | R43790, AA361533, AA449099, H50786, |
| | | | | | H89555, AI312685, R25032, AW118452, |
| | | | | | H89367, T35293, Z46079, R20776, |
| | | | | | AA334931, AA490204, R51228, AI874163, |
| | | | | | AI446400, AI475237, AA296796, |
| | | | | | AA249741, C01856, AI630454, AA449535, |
| | | | | | AW073930, AA770110, AW367213, |
| | | | | | AI633501, and AI567975. |
| HWAFG04 | 205 | 1227627 | 1-1385 | 15-1399 | AW239548, R23870, F07734, D54154, |
| | | | | | AA297059, C14980, AI418298, AA088799, |
| | | | | | C15480, R46685, AA325059, AA974700, |
| | | | | | H42947, AI302185, AI652375, AI394630, |
| | | | | | AA364780, AI936871, AA382960, |
| | | | | | AI559159, AI025217, AI983297, |
| | | | | | AI025310, AW002416, AW206793, |
| | | | | | AA593826, D57560, AW140018, |
| | | | | | AW192088, AI017077, AW401787, and |
| | | | | | AW373232. |
| HTEKT33 | 206 | 1075836 | 1-2105 | 15-2119 | AL044351, AI817283, AI024728, |
| | | | | | AI744491, AW072402, AW378258, |
| | | | | | AW072368, AL044352, AW192336, |
| | | | | | AI337979, AI627480, AI696944, |
| | | | | | AW369691, AI860188, AW378250, |
| | | | | | AW378255, AI627747, AL042027, |
| | | | | | AI926480, AW378166, AW068812, |
| | | | | | AL047150, AW029453, AA464338, |
| | | | | | AI801683, AI890113, AI745169, |
| | | | | | AI623625, AW069248, AA573520, |
| | | | | | AW378242, AW369645, AA722200, |
| | | | | | AW152579, AI679464, AI754467, |
| | | | | | AW069250, AI863890, AI420021, |
| | | | | | AI754556, AI017236, AA490151, |
| | | | | | AW337220, AI423346, AW385997, |
| | | | | | AW074087, AI015943, AI689287, |
| | | | | | AI587461, AW369622, AA428544, |
| | | | | | AI222770, AI143319, AI720991, |
| | | | | | AI754784, AW152549, AI143344, |
| | | | | | AI589285, AA582432, AA826662, |
| | | | | | AI587096, AI753623, W68196, AI754168, |
| | | | | | AW383083, AW383201, AA045260, |
| | | | | | AA844711, AW378254, AI753721, |
| | | | | | AA595042, AA432225, AI079642, |
| | | | | | AI754630, T63365, AA598475, AI962914, |
| | | | | | AW378175, T51018, AA634355, |
| | | | | | AI752372, AI922832, AI696875, |
| | | | | | AI675948, AI371134, AI598124, |
| | | | | | AI371125, AI143853, AI143041, |
| | | | | | AA779030, AI281593, AI216596, |
| | | | | | AI753783, AI313439, AI571587, |
| | | | | | AA931107, AA598793, W68075, |
| | | | | | AI339836, AW378191, AW351438, |
| | | | | | AA045150, AW169487, AI751039, |
| | | | | | AI051715, AI148583, AI970742, |
| | | | | | AI338164, AW007286, AA541755, |
| | | | | | H12770, AI694286, AI309918, AI358476, |
| | | | | | AI582893, AI304450, AA026628, N78364, |
| | | | | | D53342, AI041911, AW024056, |
| | | | | | AA935545, AW130479, W39177, |
| | | | | | AI354525, AI376810, N34461, AI808534, |
| | | | | | AA778065, AW192368, AW244107, |
| | | | | | AI589361, AI282168, AW028623, |
| | | | | | AA778055, AW150321, C17178, |
| | | | | | AI478760, AI244443, W86793, AI087238, |
| | | | | | W00916, AI446098, AA719311, H24846, |
| | | | | | AI209065, D57494, AA599264, W94304, |
| | | | | | AI083988, AI278860, AI935852, |
| | | | | | AI091878, AI829367, AI751862, |
| | | | | | AI278832, AW382654, AA620910, |
| | | | | | AW262984, W80605, AA834064, N94128, |
| | | | | | N62598, W72648, AW383076, AA026668, |
| | | | | | AW193117, AA084560, AI752585, |
| | | | | | AI624605, H49416, N55278, AI360559, |
| | | | | | AI520753, AW068113, AW370175, |
| | | | | | AL046974, AI815020, AI753242, |
| | | | | | AI963416, AI147036, H42782, AI571697, |
| | | | | | AI751040, AW242018, AI570991, H94334, |
| | | | | | AI953531, N57952, AI141927, AI752371, |
| | | | | | AW242264, D57929, W79127, W01207, |
| | | | | | AL048585, AW068071, AI624798, |
| | | | | | AA564187, W39458, W44950, AA358927, |
| | | | | | W02137, AW239018, AI751675, |
| | | | | | AA485695, AW262921, N67498, H24847, |
| | | | | | AI889395, W01047, AA329561, |
| | | | | | AA777026, N65969, AL048586, H64363, |
| | | | | | AA916595, W32452, AA455154, |
| | | | | | AI539001, AI702017, AA334020, |
| | | | | | AW382258, R77374, AA541671, |
| | | | | | AA505619, R83643, AW024024, |
| | | | | | AA953041, AI636202, R19771, R83636, |
| | | | | | F27591, F07112, F27593, AI751863, |
| | | | | | AW068339, AI920900, F06387, AI014855, |
| | | | | | H63926, H78881, AA953591, D51304, |
| | | | | | AI879452, AA718967, W87292, D56506, |
| | | | | | AW365001, N70195, M14219, AF138300, |
| | | | | | AR012319, AC007115, AF038127, |
| | | | | | U83141, AF125537, S76584, Y00712, |
| | | | | | AF125041, AF140270, U03394, X53929, |
| | | | | | L01131, AF138302, M98262, L75825, |
| | | | | | L01125, AF138304, L01127, L01130, |
| | | | | | L01128, L01126, L01129, A62298, |
| | | | | | A82595, AR050070, and A82593. |
| HBXDM07 | 207 | 1206657 | 1-2110 | 15-2124 | AI672363, AI589203, AI631066, |
| | | | | | AI810806, AI654696, AA700425, |
| | | | | | AW249815, AI271343, AI127886, |
| | | | | | AI581871, AW044228, AA188637, |
| | | | | | AI769068, AI142895, AA084919, |
| | | | | | AA451876, AA482390, D20750, |
| | | | | | AA463624, AI351007, AI240526, |
| | | | | | AA074549, AW090810, AI143138, |
| | | | | | AI762690, AI752042, AI912224, R56540, |
| | | | | | AI127226, AA626231, R56145, AA190610, |
| | | | | | AA085022, AI336960, AI962785, |
| | | | | | AI690749, AA035626, AI762681, |
| | | | | | AA346622, AA847532, AW139485, |
| | | | | | AA426415, AI625813, AA443041, |
| | | | | | AI940415, AA062842, AA599682, |
| | | | | | AW374890, AI659071, AA953644, and |
| | | | | | U35245. |
| HFPFA83 | 208 | 955614 | 1-723 | 15-737 | C14389, C15076, D59467, D58283, |
| | | | | | D50979, D80522, D80164, D80166, |
| | | | | | D80195, D80043, D80227, D81030, |
| | | | | | D59275, D59502, D80188, D59859, |
| | | | | | D80022, C14331, D51423, D59619, |
| | | | | | D80210, D51799, D80391, D80240, |
| | | | | | D80253, D80038, D80269, D59787, |
| | | | | | D80193, D59610, D80212, D80196, |
| | | | | | D80219, D81026, D59927, D57483, |
| | | | | | D80378, AW177440, D80366, D80251, |
| | | | | | AA305409, AA305578, D59889, D50995, |
| | | | | | D80024, D80241, D51022, D80045, |
| | | | | | C14429, D51060, C75259, T03269, |
| | | | | | AW178893, AW179328, AA514188, |
| | | | | | AW378532, D80248, C14014, AW377671, |
| | | | | | D51250, AW369651, AW178762, |
| | | | | | AW178775, AW177501, D80134, |
| | | | | | AW177511, AA514186, D80133, |
| | | | | | AW176467, D58253, AW360811, |
| | | | | | AW352117, C05695, AW375405, |
| | | | | | AW352158, D80268, AI910186, D80132, |
| | | | | | AW366296, AW178906, AW360844, |
| | | | | | AW360817, AW375406, AW378534, |
| | | | | | AW179332, AW377672, AW179023, |
| | | | | | AW178905, D80302, D59627, AI905856, |
| | | | | | AW378540, AW352171, D80258, D80439, |
| | | | | | AW377676, AW352170, AW177731, |
| | | | | | AW178907, AW179019, AW179024, |
| | | | | | D59373, D80247, AW177505, AW179020, |
| | | | | | AW360841, AW178909, AW177456, |
| | | | | | AW179329, AW178980, AW177733, |
| | | | | | AW378528, AW178908, AW178754, |
| | | | | | AW179018, AW352174, Z21582, |
| | | | | | AW360834, D51103, AW179004, |
| | | | | | AW179012, C06015, AW178914, |
| | | | | | AW378525, AW367967, D80157, |
| | | | | | AW177722, D51759, AW177728, |
| | | | | | AW179009, AA285331, AW178774, |
| | | | | | AW178911, D51097, AW378543, |
| | | | | | AW352163, D58101, D80064, D58246, |
| | | | | | D80014, D59503, AW178983, AW352120, |
| | | | | | AW178781, T48593, AI535850, |
| | | | | | AW177723, T11417, D59653, AA809122, |
| | | | | | AW177508, D45260, D59317, C14975, |
| | | | | | AW378533, AW367950, F13647, D81111, |
| | | | | | H67854, C03092, C14227, H67866, |
| | | | | | AI557774, AI525923, AW177497, T02974, |
| | | | | | AI557751, AW178986, T03116, C14298, |
| | | | | | D45273, D52291, AW177734, D59474, |
| | | | | | AI525917, AI525227, D59695, D60010, |
| | | | | | C14973, AI535961, C14344, C14407, |
| | | | | | AI535686, C14957, D51221, D59551, |
| | | | | | AI525920, AA514184, AI525242, D60214, |
| | | | | | T03048, C14046, AI525912, AI525235, |
| | | | | | C16955, AI525925, AI525222, D80168, |
| | | | | | AW378542, AW378539, AI525215, |
| | | | | | AI525237, C05763, Z33452, AI525928, |
| | | | | | AW360855, T02868, D51213, D31458, |
| | | | | | H67858, AR018138, AJ132110, A84916, |
| | | | | | A62300, A62298, AR008278, AF058696, |
| | | | | | AB028859, X67155, Y17188, D26022, |
| | | | | | A25909, A67220, D89785, A78862, |
| | | | | | D34614, D88547, I82448, Y12724, |
| | | | | | X82626, AR025207, AR016808, A82595, |
| | | | | | AR060385, A94995, AB002449, |
| | | | | | AR008443, AB012117, I50126, I50132, |
| | | | | | I50128, I50133, AR066488, AR016514, |
| | | | | | AR060138, A45456, A26615, AR052274, |
| | | | | | A85396, AR066482, A44171, A85477, |
| | | | | | I19525, A86792, Y09669, A43192, |
| | | | | | A43190, AR038669, AR066490, U87250, |
| | | | | | AR066487, X93549, I14842, A30438, |
| | | | | | I18367, D88507, AR054175, D50010, |
| | | | | | Y17187, A63261, AR008277, AR008281, |
| | | | | | AR008408, AR062872, A70867, |
| | | | | | AR016691, AR016690, U46128, D13509, |
| | | | | | I79511, A64136, A68321, AR060133, |
| | | | | | X68127, AF135125, U79457, AF123263, |
| | | | | | AB023656, AR032065, AB033111, |
| | | | | | X93535, and AR008382. |
| HKADO36 | 209 | 1189002 | 1-1364 | 15-1378 | AI886975, AJ011372, AC001644, and |
| | | | | | AC002325. |
| HFXKG51 | 210 | 956596 | 1-1114 | 15-1128 | R29445, AA585101, AA585476, Z28355, |
| | | | | | Z30131, T11028, D57491, AI546999, |
| | | | | | D57186, AI541365, T18597, AI541374, |
| | | | | | C16300, AI525431, AI546945, R28735, |
| | | | | | R45895, AI525306, AA585098, AI525556, |
| | | | | | AI541523, AI547006, R29218, D55233, |
| | | | | | AI557262, R28892, AA283326, AI526184, |
| | | | | | D61254, AI546875, AA170832, AI540967, |
| | | | | | Z32822, R28895, R28967, R28965, |
| | | | | | AI557734, AI541535, C15406, AI547039, |
| | | | | | AI557763, D60765, C16305, R29177, |
| | | | | | AA585439, AI557787, AI526194, |
| | | | | | AI541205, D61185, AI526140, AI557740, |
| | | | | | AI546891, C16293, C15069, AA585329, |
| | | | | | AI541307, AI526073, AI557731, |
| | | | | | AA585325, AI541514, AI541013, |
| | | | | | AI557727, AI557807, AI541346, |
| | | | | | AI541517, D60844, D59436, AI546996, |
| | | | | | AI547250, AI557864, AI557084, |
| | | | | | AI525316, R29172, AI557408, AA174170, |
| | | | | | AL043444, AL044125, AI541356, T41289, |
| | | | | | AA585453, AI541510, D53472, C15737, |
| | | | | | AI546971, AI556967, AI526176, |
| | | | | | AI525500, AI541345, AI546921, |
| | | | | | AI546828, AI525320, AL041347, |
| | | | | | AL044529, AI540974, R29179, AI526180, |
| | | | | | AI557602, C14723, R29262, AJ239433, |
| | | | | | AL041233, AI557808, AL041296, |
| | | | | | AI526195, AL041086, AL043496, |
| | | | | | AI541390, AL044162, D54897, C15120, |
| | | | | | AI546829, D53161, AI526113, D59751, |
| | | | | | AL040193, C16294, AL041324, AI546855, |
| | | | | | AL043538, AL040621, C16292, AL041098, |
| | | | | | AL041163, AI526187, AL041277, |
| | | | | | AI541508, AL041358, AL041096, |
| | | | | | AL047012, R29657, AL040464, AL041346, |
| | | | | | AI535813, AL040155, T41329, AL041197, |
| | | | | | AI526158, AL043612, AL039915, |
| | | | | | AL040463, AI557155, AL047219, |
| | | | | | AL041227, AL047057, AL047170, |
| | | | | | AL040119, AL047036, AL041292, |
| | | | | | AL041051, AL047183, AL040322, |
| | | | | | AL041131, AL046330, AL041133, |
| | | | | | AL041159, AL041238, AL041142, |
| | | | | | AL045817, AI541534, AA585356, |
| | | | | | AL040625, AL040510, AL043467, |
| | | | | | AL044186, AL040529, AI541383, |
| | | | | | AL044037, AL040091, AL040128, |
| | | | | | AL040168, AL040255, AL040285, |
| | | | | | AL040342, AL040332, AL040617, |
| | | | | | AL045684, AL040745, AL040370, |
| | | | | | AL043677, AL046442, AL040839, |
| | | | | | AL041752, AL041168, AL043775, |
| | | | | | AL044165, AL041140, AL043492, |
| | | | | | AL041602, T23985, AL045920, AL037436, |
| | | | | | AL038838, AL044074, AL041635, |
| | | | | | AL045990, AL040458, AL044199, |
| | | | | | AL044187, AL040090, AL040263, |
| | | | | | AL040294, AL040329, AL040082, |
| | | | | | AL044272, AL040444, AL041186, |
| | | | | | AL040148, AL045725, AL041730, |
| | | | | | AL041523, AL043627, AL079878, |
| | | | | | AL046392, AL041374, D53447, |
| | | | | | AL040052, AL043845, AI525339, |
| | | | | | AL039338, AL042135, AL044064, |
| | | | | | AL038983, AL039316, AL043923, |
| | | | | | AL043814, AA585155, AL043537, |
| | | | | | AL043848, AL037435, AL041459, |
| | | | | | AL043570, AL041577, C15762, AL044201, |
| | | | | | AL044258, AL046850, AL038532, |
| | | | | | AL040768, AL037727, AI557238, |
| | | | | | AL046994, AL040253, AL040414, |
| | | | | | AI541017, AL040571, AL046914, |
| | | | | | AI142134, AL040576, T23957, AL045753, |
| | | | | | AR062871, A25909, AR038855, AJ244005, |
| | | | | | Y16359, AJ244004, D50010, Y09813, |
| | | | | | AF082186, AR062872, AJ244003, |
| | | | | | AR062873, A20702, D78345, AR017907, |
| | | | | | A20700, A43189, A43188, X81969, |
| | | | | | A85395, A85476, D13509, Z32836, |
| | | | | | AJ244007, AR037157, A98420, A98423, |
| | | | | | A98432, A98436, A98417, A98427, |
| | | | | | A98767, AR038762, A93963, A93964, |
| | | | | | I63120, I05558, I44681, X83865, A84772, |
| | | | | | A70872, I08396, I08389, A84776, A84773, |
| | | | | | A84775, A84774, AR054109, AR067731, |
| | | | | | I15718, AR067732, A86792, A58522, |
| | | | | | A91750, AR008429, AB025273, I13349, |
| | | | | | A18053, A60212, A60209, A60210, |
| | | | | | A60211, E03627, I84553, I19525, I84554, |
| | | | | | I48927, I15717, AR031566, A90655, |
| | | | | | D13316, AC005913, A35536, A35537, |
| | | | | | A02135, A02136, A04663, A04664, |
| | | | | | A02712, A77094, A77095, M28262, |
| | | | | | A81878, I00682, A95051, I06859, A18050, |
| | | | | | A23334, A75888, I70384, A64973, |
| | | | | | A60111, A23633, AR007512, A11623, |
| | | | | | A11624, E00609, E13740, A11178, |
| | | | | | E01007, A10361, AF149828, I08395, |
| | | | | | AR043601, A11245, AR054723, I03331, |
| | | | | | A02710, E12615, AR035193, A92133, |
| | | | | | E14304, A07700, A13392, A13393, I62368, |
| | | | | | AR031488, I13521, I52048, A27396, |
| | | | | | AR027100, I49890, I44531, I28266, |
| | | | | | I21869, A91965, I44516, A70040, E16678, |
| | | | | | I01995, A82653, E16636, A95117, |
| | | | | | AJ230935, A93016, A24783, A24782, |
| | | | | | AR051957, I25027, A58524, A58523, |
| | | | | | I26929, I44515, I26928, I26930, I26927, |
| | | | | | AR038066, I08051, X55486, A22738, |
| | | | | | I66498, I66497, I66496, I66486, I60241, |
| | | | | | I60242, A20699, E00696, AJ231028, |
| | | | | | E00697, E03813, I66482, AR009151, |
| | | | | | I66485, E17098, I66483, I66484, |
| | | | | | AR027099, I66487, AJ230902, AJ230972, |
| | | | | | AJ230951, AJ230867, AR051652, |
| | | | | | AR063812, S60422, AR051651, A06631, |
| | | | | | X82786, I66495, I66494, AJ231009, |
| | | | | | Y14219, A22734, X76012, AJ230845, |
| | | | | | I05845, AR035975, AR035977, AJ244006, |
| | | | | | AR022273, AJ243486, AR051865, I03669, |
| | | | | | I03668, A16035, I18895, AJ231011, |
| | | | | | I33632, AR003381, AJ230996, Y09940, |
| | | | | | AR035974, AR035976, AR035978, |
| | | | | | E03654, AR031358, AR031365, I36244, |
| | | | | | AR051864, A22739, AR017826, A05993, |
| | | | | | and A05991. |
| HFPHR82 | 211 | 1187749 | 1-1597 | 15-1611 | AA913364, AW027373, AW305275, |
| | | | | | AI799031, AW117480, AA588138, |
| | | | | | AA775450, AW190848, AA411334, |
| | | | | | AA866178, W61038, AA411335, |
| | | | | | AA775769, AA769134, AA075643, |
| | | | | | N30274, AA627544, AI493881, AI147666, |
| | | | | | AA075644, AA614747, N30309, |
| | | | | | AA812101, AI025647, AA868924, |
| | | | | | AW339918, AI140386, N94919, AI143201, |
| | | | | | AI347094, AI138196, AA284960, |
| | | | | | AI933338, AI343592, AI128292, |
| | | | | | AI017993, AI492556, N20511, N41996, |
| | | | | | N42630, W72001, W69402, AI554835, |
| | | | | | AI679099, AA040263, T32745, AA872581, |
| | | | | | N29505, AI354734, AI268560, AI017992, |
| | | | | | F28362, AA448442, AI679673, AA863176, |
| | | | | | AA719956, AA444022, AI142803, |
| | | | | | AA732322, AI304774, AI475118, |
| | | | | | AA993672, AI624135, AA846235, |
| | | | | | W44314, W44778, W37097, AA682603, |
| | | | | | W65308, AA448307, AW274816, N25416, |
| | | | | | AI339799, AI128110, D79265, AI004213, |
| | | | | | AA305351, AA285117, AI149185, |
| | | | | | AI285067, AI872626, AI186604, |
| | | | | | AA557809, AA444000, AI344717, |
| | | | | | AA922743, N56641, AA996037, H13966, |
| | | | | | AA515842, F37123, AA732278, |
| | | | | | AA989130, W65338, W76570, R21057, |
| | | | | | N26843, AA721150, AI239957, AI580506, |
| | | | | | R96887, AA034909, W45686, W69363, |
| | | | | | F09166, H12989, W19542, N57447, |
| | | | | | R96888, C04314, AW183468, H87003, |
| | | | | | AI719584, R24370, T35889, AI685763, |
| | | | | | AA081676, T34115, N40568, AA010732, |
| | | | | | AW023063, N63592, T35834, AW089136, |
| | | | | | AA913531, Z42311, F11505, T35841, |
| | | | | | T30076, H05630, AA863208, AA505347, |
| | | | | | T30517, H27007, AI366940, Z42248, |
| | | | | | F09167, H87002, W56871, T36163, |
| | | | | | AA040400, W19619, AA721261, |
| | | | | | AA649338, F34780, T35871, R46237, |
| | | | | | H13965, AA913094, T35833, AA034976, |
| | | | | | AA890331, AI274646, N63619, AA082031, |
| | | | | | F05477, AA603299, AA322616, |
| | | | | | AA603386, R27044, Z38484, AI564372, |
| | | | | | AI859366, F01840, R27043, R27029, |
| | | | | | R27028, AA748381, F01739, AA355325, |
| | | | | | AI859362, H53598, N46608, AA339209, |
| | | | | | and AF190797. |
| HISAF59 | 212 | 959140 | 1-899 | 15-913 | AW401787, AI394630, AI418298, |
| | | | | | AW375742, T30407, Z44281, F07299, |
| | | | | | R25015, T32685, AA974700, F07734, |
| | | | | | AA297059, AW239548, AA897415, |
| | | | | | R45025, AI807678, AI343378, AW206793, |
| | | | | | AW138409, AW163027, AI815476, |
| | | | | | AA503315, AA047793, AW137324, |
| | | | | | AW140018, AI936871, AI015047, |
| | | | | | AI017077, AI168175, AI302185, |
| | | | | | AI025217, F03423, R46686, AI073417, |
| | | | | | Z40806, AA026054, AW002416, |
| | | | | | AI652375, F03562, T03397, AI983297, |
| | | | | | H42881, T82311, AI025310, AI831833, |
| | | | | | R08769, AI911100, AA471062, |
| | | | | | AW157059, AA382959, H22172, |
| | | | | | AI356604, AI537006, AI825970, |
| | | | | | AW338394, AW192088, AI559159, |
| | | | | | AA593826, AW078709, and Z61277. |
| HCEHD66 | 213 | 1136122 | 1-926 | 15-940 | AI968437, AI824971, AW104052, |
| | | | | | AI762197, AI598138, AI088543, |
| | | | | | AW135225, AI827280, AW007187, |
| | | | | | AI391466, AA534403, AW028554, |
| | | | | | AI492390, AI369729, AA135928, |
| | | | | | AA507443, AW137272, AW381735, |
| | | | | | AW006062, AW138526, W81153, |
| | | | | | AA918755, AA085774, AA058923, |
| | | | | | C03738, R85039, AI937792, AI867512, |
| | | | | | N62215, AI864402, N62216, D44882, |
| | | | | | H14329, H40979, AI808139, AA463408, |
| | | | | | AI744140, H40980, AI479413, N62166, |
| | | | | | AA319197, W30972, AA460467, |
| | | | | | AA135929, AI400940, N62223, AF186409, |
| | | | | | L27421, and AC006241. |
| HE8UY74 | 214 | 1163590 | 1-591 | 15-605 | N23547, H06088, Z24919, AA010516, |
| | | | | | R94366, AA004981, AA304780, |
| | | | | | AA343256, and N31310. |
| HAHIY08 | 215 | 962113 | 1-265 | 15-279 | AA100160, AA307684, AA244505, |
| | | | | | R57782, AA864846, AR044133, and |
| | | | | | AR044123. |
| H2CBH45 | 216 | 1128919 | 1-983 | 15-997 | AA307462, H86407, AA019170, |
| | | | | | AW351511, AA036880, AA045560, |
| | | | | | D89677, and AL133047. |
| HMVAM09 | 217 | 1194828 | 1-1835 | 15-1849 | AI685410, AA873182, AI969804, N21495, |
| | | | | | AA708519, AA581446, AA035001, |
| | | | | | AI088511, N20223, AA101798, AA534317, |
| | | | | | AA397365, AA621392, AA397470, |
| | | | | | AI343916, AA035462, AI682643, |
| | | | | | AA397454, AA565111, AI096942, N68558, |
| | | | | | AA101799, AW029215, AI802673, |
| | | | | | AI130817, N73321, AA470951, AA470484, |
| | | | | | AI302901, N29290, AW024919, |
| | | | | | AA358533, AW135812, AI376856, |
| | | | | | AA740383, AA349063, AW051031, and |
| | | | | | AI276887. |
| HFPEN04 | 218 | 1199663 | 1-2090 | 15-2104 | AI631883, AI767614, AA018867, |
| | | | | | AA019175, R56792, AI497937, N95592, |
| | | | | | R44001, AW271411, R56793, Z38315, and |
| | | | | | Z42023. |
| HSLJD02 | 219 | 1104452 | 1-965 | 15-979 | AI905856, AW178893, T03269, D80164, |
| | | | | | D58283, D59859, D80022, D80166, |
| | | | | | D80195, D80193, D59927, D51423, |
| | | | | | D59619, D80210, D51799, D80391, |
| | | | | | D59275, D80240, D80253, D80043, |
| | | | | | D59787, D80227, D59502, AW177440, |
| | | | | | D59467, D81030, AW179328, D80212, |
| | | | | | D51060, D80196, D80188, D80219, |
| | | | | | C14014, C14331, D80038, D80269, |
| | | | | | D80366, D57483, C15076, AW178775, |
| | | | | | D50979, D50995, D59889, AW360811, |
| | | | | | D80134, C14389, AW366296, AW375405, |
| | | | | | D80045, AW378532, D51097, AA305409, |
| | | | | | AW177501, AW177511, AW178762, |
| | | | | | AW377671, D51022, AW375406, |
| | | | | | AW378534, AW179332, AW377672, |
| | | | | | AW179023, AW178905, AW352170, |
| | | | | | AW367967, D58253, D81026, AW178980, |
| | | | | | AA305578, AW377676, AW352171, |
| | | | | | AW177731, AW178907, AW178906, |
| | | | | | D80248, D80132, AW179019, AW179024, |
| | | | | | D80522, D80133, AA514186, AA514188, |
| | | | | | AW179329, AW378528, D80247, D80439, |
| | | | | | T48593, D89785, D34614, X67155, |
| | | | | | AR018138, D88547, X82626, A84916, |
| | | | | | A67220, A62300, A62298, Y17188, |
| | | | | | A78862, D26022, AJ132110, A25909, |
| | | | | | AB012117, AR025207, A85396, A44171, |
| | | | | | I19525, A85477, AR066482, A86792, |
| | | | | | Y12724, AF058696, AB028859, |
| | | | | | AR008278, X93549, A94995, I18367, |
| | | | | | AR066490, D88507, AR008443, |
| | | | | | AR066488, D13509, A82595, A26615, |
| | | | | | AR052274, AR016514, D50010, |
| | | | | | AR060138, A45456, Y09669, AR060385, |
| | | | | | AB002449, and AR008408. |
| HDPFZ30 | 220 | 1220164 | 1-1683 | 15-1697 | AA582196, AI690196, AW207633, |
| | | | | | AI417381, AI494563, H15131, AI220943, |
| | | | | | AI963799, AW055140, AI680222, N54913, |
| | | | | | AW008673, AI000592, H04038, |
| | | | | | AA385773, H03355, AW374840, |
| | | | | | AI014381, H15190, Z41172, AW374989, |
| | | | | | F08100, AA348883, N88565, AI924734, |
| | | | | | T03532, and AA348882. |
| HPJCR33 | 221 | 1217931 | 1-2404 | 15-2418 | AA630312, AA399309, AI566447, |
| | | | | | W45583, AA148064, AI379707, AI041054, |
| | | | | | AA478756, AI581333, AI745305, |
| | | | | | AA253311, AA947298, AI744665, |
| | | | | | AA545782, AA194036, AA479976, |
| | | | | | R61402, AW297108, AI083947, |
| | | | | | AA398243, AA235081, AI700620, |
| | | | | | AI458557, W45546, AI433426, AI092537, |
| | | | | | AA195635, Z46141, H15959, AA235210, |
| | | | | | AA743383, AI656322, AA015701, |
| | | | | | AA766679, R23558, AI702152, AI370616, |
| | | | | | R61360, AI038624, AA018978, Z41774, |
| | | | | | R60379, AI535639, R14628, R68398, |
| | | | | | R31614, H01672, AA585439, Z28355, |
| | | | | | M85798, R31659, AA585101, R45613, |
| | | | | | Z30131, N87140, AI525556, AI546999, |
| | | | | | AI541365, AI525306, R68600, AI557731, |
| | | | | | AA585453, AI525431, AI535660, |
| | | | | | AI536138, AI547039, AI526194, |
| | | | | | AI540967, AI546855, AI541535, |
| | | | | | AI557807, T11028, AI557262, AI541374, |
| | | | | | AI541514, AI556967, AI526140, |
| | | | | | AI541510, R29445, D61254, AI525316, |
| | | | | | AI541523, H01673, AI546828, R28735, |
| | | | | | AI541013, AI557787, AA585440, D57491, |
| | | | | | AA585434, AL041159, AI541509, R32345, |
| | | | | | AA585476, AL041142, AL041238, |
| | | | | | AL041133, AL047183, AL040322, |
| | | | | | AL041131, AL046330, AL041051, |
| | | | | | AL041292, AL040119, AL047036, |
| | | | | | AL047170, AL047057, AL047219, |
| | | | | | AL041227, AL040463, AL039915, |
| | | | | | AL043612, AL045817, AL041197, |
| | | | | | AL040155, AL041346, AL040529, |
| | | | | | AL041096, AL047012, AL041358, |
| | | | | | AL041277, AL041163, AL041098, |
| | | | | | AL040621, AL043538, AL041324, |
| | | | | | AL040464, AL044162, AL041086, |
| | | | | | AL043496, AL041296, AL041233, |
| | | | | | AL041278, AL045725, AL041140, T23985, |
| | | | | | AL040193, AL040625, AI541534, |
| | | | | | AL040510, C16300, AL043467, AL044186, |
| | | | | | AL040553, AL038761, AL044037, |
| | | | | | AL040091, AL040128, AL040168, |
| | | | | | AL040255, AL040285, AL040342, |
| | | | | | AL040332, AL040617, AL045684, |
| | | | | | AL040149, AL040745, AL040370, |
| | | | | | AL043677, AL046442, AL040839, |
| | | | | | AL041752, AL043775, AL044165, |
| | | | | | AL043492, AL041602, AL045920, |
| | | | | | AL038838, AL044074, AL041635, |
| | | | | | AL045990, AL040458, AL044199, |
| | | | | | AL044187, AL040090, AL040263, |
| | | | | | AL040294, AL040329, AL040082, |
| | | | | | AL044272, AL041186, AL040148, |
| | | | | | AL041730, AL041523, AL043627, |
| | | | | | AL040253, AL046392, AL041374, |
| | | | | | AI535813, AL040052, AL043845, |
| | | | | | AL043537, AL039338, AL042135, |
| | | | | | AL044064, AL038983, AL039316, |
| | | | | | AL043923, AL043814, AL043848, |
| | | | | | AL041459, AL043570, AL041577, |
| | | | | | AL044201, AL044258, AL046850, |
| | | | | | AL038532, AL040768, AL037727, |
| | | | | | AI546891, AL046994, AL040414, |
| | | | | | AL040571, AL046914, AI142134, |
| | | | | | AL040576, AL045753, AL044274, |
| | | | | | AL079878, AL049018, AL040444, |
| | | | | | AL045857, AL041168, AI541205, |
| | | | | | AL039744, AL038822, AL045671, |
| | | | | | AI541508, T41289, AI525320, AL046327, |
| | | | | | AI557796, AL040238, C16305, AL049069, |
| | | | | | AL043444, AL041246, AL040472, |
| | | | | | AL040075, AL041347, AL041955, |
| | | | | | AI557799, T23957, AL080031, AR038855, |
| | | | | | AR062871, A25909, A85395, A85476, |
| | | | | | AR008429, AR062872, AF082186, |
| | | | | | AR062873, AR017907, AJ244004, |
| | | | | | AJ244005, A20702, A20700, A43189, |
| | | | | | A43188, AJ244003, AR037157, A98420, |
| | | | | | A98423, A98432, A98436, A98417, |
| | | | | | A98427, I63120, A98767, I18895, A93963, |
| | | | | | A93964, A58522, Y16359, I44681, |
| | | | | | AR038762, A84772, A84774, A84776, |
| | | | | | A84773, A84775, AR054109, AR067731, |
| | | | | | AR067732, A91750, X83865, D78345, |
| | | | | | A86792, AI8053, M28262, I06859, I13349, |
| | | | | | I15717, I15718, E03627, U94592, |
| | | | | | AJ244007, I48927, I19525, A02712, |
| | | | | | A77094, A77095, I84553, A81878, |
| | | | | | A95051, I84554, A18050, A23334, |
| | | | | | A75888, I70384, A64973, A60111, |
| | | | | | A23633, AR007512, I08396, A60212, |
| | | | | | A60209, A60210, A60211, I00682, |
| | | | | | A11624, A11623, E00609, E13740, |
| | | | | | A11178, E01007, A10361, A91965, I49890, |
| | | | | | A93016, A35537, A35536, A02136, |
| | | | | | A04664, A02135, A04663, I08395, |
| | | | | | AR043601, A11245, I03331, E12615, |
| | | | | | A02710, AR035193, E14304, A07700, |
| | | | | | AI3393, AI3392, I62368, AR031488, |
| | | | | | I13521, I52048, A27396, AR027100, |
| | | | | | I44531, I28266, I21869, A70040, E16678, |
| | | | | | A82653, E16636, A24783, A24782, |
| | | | | | A92133, A95117, A58524, A58523, |
| | | | | | A90655, I44516, AF149828, I01995, |
| | | | | | I08051, AR031566, I25027, I26929, |
| | | | | | I44515, I26928, I26930, I26927, I60241, |
| | | | | | I60242, AR038066, A20699, E00696, |
| | | | | | E00697, E03813, I66482, AR009151, |
| | | | | | I66485, I66483, I66484, I66497, I66496, |
| | | | | | AR027099, I66486, I66487, Y09813, |
| | | | | | I66498, AR051652, AR051651, Z32836, |
| | | | | | A62298, X81969, AJ230935, D50010, |
| | | | | | AJ230902, I05558, AJ230972, A62300, |
| | | | | | A70872, A82595, AJ230951, U87250, |
| | | | | | A84916, I08389, A22738, D13316, |
| | | | | | X07299, A70869, D13509, AR035975, |
| | | | | | AR035977, AB025273, AR051957, |
| | | | | | E12584, I18302, AR018138, AC005332, |
| | | | | | Y17188, AR035974, AR035976, |
| | | | | | AR035978, AR016808, I66495, I66494, |
| | | | | | AJ132110, E17098, I66481, A83642, |
| | | | | | A83643, I66488, I66489, I66490, I66491, |
| | | | | | I66492, I66493, A83151, AR008278, |
| | | | | | X55486, A22734, AR022273, AJ231028, |
| | | | | | AB028859, AF058696, AC005913, |
| | | | | | AR054723, AR064707, Y17187, AJ230867, |
| | | | | | AJ230845, AI231009, A94995, X67155, |
| | | | | | D26022, A67220, D89785, A78862, |
| | | | | | D34614, I36244, AF006072, AR051864, |
| | | | | | D88547, Y12724, A06631, X82786, |
| | | | | | S60422, AR051865, R32371, and |
| | | | | | AI191037. |
| HTOAK34 | 222 | 1081321 | 1-827 | 15-841 | AA491322, AA505126, and AW408167. |
| HE8N124 | 223 | 971296 | 1-737 | 15-751 | AA883367, AA332611, AA732890, |
| | | | | | AI283442, AI673342, AI631153, |
| | | | | | AI200800, AI910962, T11417, D80258, |
| | | | | | D59503, D80014, D81111, C14227, |
| | | | | | D80064, AI557751, D58246, C06015, |
| | | | | | AA514184, AI535959, AW178893, |
| | | | | | AW178907, AW375405, AW177440, |
| | | | | | AI535686, AW360834, AW178908, |
| | | | | | AW360811, D80314, AA809122, D80251, |
| | | | | | D80253, C03092, D80247, D80043, |
| | | | | | AA285331, AW176467, C14389, |
| | | | | | AW179328, T48593, AW375406, D80439, |
| | | | | | AW378534, AW179332, D58283, |
| | | | | | AW377672, AW179023, AW178905, |
| | | | | | D59859, D80022, C14331, D80166, |
| | | | | | AW177731, D80195, AA305578, D80193, |
| | | | | | D59927, T03269, D59467, D51423, |
| | | | | | D59619, AW378528, D80210, AW178906, |
| | | | | | D51799, D80391, D80164, D59275, |
| | | | | | AW178762, D80240, D80038, AW179019, |
| | | | | | D59787, D80227, AW378533, D59502, |
| | | | | | AA305409, AW378532, F13647, D45260, |
| | | | | | AW178914, AW378542, AW360855, |
| | | | | | AW377676, I50126, I50132, I50128, |
| | | | | | I50133, AF123263, A70867, D88547, |
| | | | | | AR062872, AR066488, AR016514, |
| | | | | | A62300, D50010, X82626, AR066487, |
| | | | | | Y17187, AR060138, A84916, A45456, |
| | | | | | A67220, D89785, A62298, Y09669, |
| | | | | | Y17188, AB028859, A82595, A78862, |
| | | | | | D34614, A94995, D26022, AR060385, |
| | | | | | A30438, AJ132110, AR018138, A26615, |
| | | | | | AR052274, A43192, AR008278, X67155, |
| | | | | | Y12724, A63261, A43190, AR038669, |
| | | | | | AF058696, A25909, X68127, AR008443, |
| | | | | | AB002449, AR025207, AR016691, |
| | | | | | AR016690, and U46128. |
| HAMFM39 | 224 | 1055532 | 1-4620 | 15-4634 | AI660231, AI304355, AI745391, |
| | | | | | AI951619, AI814592, AI467782, |
| | | | | | AI274105, AA426190, AW301083, |
| | | | | | AI375593, AI922346, AI829867, |
| | | | | | AW136366, AA227834, AW105735, |
| | | | | | AI304726, AW194167, AW297557, |
| | | | | | AI971865, AA151872, AI985643, |
| | | | | | AA757072, AW028756, AI202419, |
| | | | | | AI346603, AW295401, AW176248, |
| | | | | | AI659079, AA149658, AA425159, |
| | | | | | AI870033, AW194075, AA233413, |
| | | | | | AW102818, AI765117, R61588, |
| | | | | | AA365664, AA365663, AA601170, |
| | | | | | R61532, AA357346, and AA551861 |
| HBGMG39 | 225 | 1126283 | 1-343 | 15-357 | AI497641, AW069135, AI623708, |
| | | | | | AW084071, AW339039, AI569972, |
| | | | | | AL036585, AW192429, AI458409, |
| | | | | | AI379125, AI066465, AW003414, |
| | | | | | AI742565, AI740930, AI743686, |
| | | | | | AI168481, AI991329, AI061450, |
| | | | | | AW007899, AW102701, AI342244, |
| | | | | | AI609020, AI453165, AI248142, |
| | | | | | AW044270, AI761292, AI693756, |
| | | | | | AI870883, AI129686, AI992036, |
| | | | | | AW057507, AW151858, AI362058, |
| | | | | | AI475537, AI864435, AI479128, |
| | | | | | AI378430, AW008808, AI080156, |
| | | | | | AW191953, AW080685, AI627434, |
| | | | | | AI369151, AI926062, AI963067, |
| | | | | | AI923881, AI740972, AL045227, |
| | | | | | AI351617, AI334039, AI452903, |
| | | | | | AI700412, AI469546, AI187911, |
| | | | | | AI066744, AA551905, AW132118, |
| | | | | | AI190677, AI812069, AI081231, |
| | | | | | AI050026, AA577674, AI890929, |
| | | | | | AI096904, AI554840, AW073739, |
| | | | | | AW190499, AW250073, AI524714, |
| | | | | | AI884727, AW168902, AI858574, |
| | | | | | AI422058, AA304774, AI890721, |
| | | | | | AI052823, AI683215, AA682804, |
| | | | | | AI087154, AW004991, AI640737, |
| | | | | | AA461453, AI668789, AA532435, |
| | | | | | AA912478, AW079985, AA054275, |
| | | | | | AA970861, AI819302, AW085591, |
| | | | | | AA010790, AI017023, AI217784, |
| | | | | | AI584163, AI581899, AI569968, |
| | | | | | AA984939, AI469425, AA709077, |
| | | | | | AA744639, AA779825, AI000961, |
| | | | | | AI095374, AA864689, AI564659, |
| | | | | | AA969103, AA827905, AA918799, |
| | | | | | AA862362, AA446048, AA024454, |
| | | | | | AW087352, N53410, AI672825, W48745, |
| | | | | | N20167, AA931463, AI587533, AI193638, |
| | | | | | AA612750, AW150032, AI961508, |
| | | | | | AA024670, AI619904, AA429899, |
| | | | | | W02113, AA969104, AW190663, |
| | | | | | AA765028, AA780072, N50640, |
| | | | | | AA533847, AW182184, W32574, |
| | | | | | AW073566, AI933617, AL041483, |
| | | | | | AI952283, AA937508, AI095341, |
| | | | | | AI917215, N48059, T23065, AI869852, |
| | | | | | N78603, AW444850, AA877348, |
| | | | | | AA010101, AA252354, AW297832, |
| | | | | | AA011219, AW204879, AA506948, |
| | | | | | AI167689, N53257, AI917614, AI937775, |
| | | | | | AW168023, AI858564, AW043696, |
| | | | | | AA450098, AI263865, AI885655, |
| | | | | | AW139189, AA883859, AI801558, |
| | | | | | AI859652, AI554186, AA151875, |
| | | | | | AA187616, AI828806, AI095024, |
| | | | | | AI628324, AI678623, AW161202, |
| | | | | | AI560004, AI393038, AI584130, |
| | | | | | AI687568, H89138, AA835947, AI673140, |
| | | | | | AI521005, AI287476, AI678324, E12258, |
| | | | | | AF153686, E12259, E12260, D44497, |
| | | | | | AC007559, A15345, X99971, AL080159, |
| | | | | | AL133062, AF061981, AF111849, A21103, |
| | | | | | and S36676. |
| HSXBV89 | 226 | 1128699 | 1-2233 | 15-2247 | Z99410, AW373793, AA553665, |
| | | | | | AI190674, AI366341, AI184600, |
| | | | | | AW004692, H10539, AA482462, R45646, |
| | | | | | AI521134, AA973962, R42556, AA720003, |
| | | | | | H11452, AA211375, R22747, AW009222, |
| | | | | | AA417872, AA632195, W39346, R52677, |
| | | | | | R61178, AA720022, R61892, T80548, |
| | | | | | R20364, H46470, F07364, R86859, |
| | | | | | R55930, Z41453, AI360146, R87776, |
| | | | | | H08592, AA483558, W38313, R55720, |
| | | | | | R43749, T30657, AA426408, H95699, |
| | | | | | AA363950, R18352, R15260, R18538, |
| | | | | | R87830, F05821, R87766, R10214, |
| | | | | | R90750, T15918, F03602, T34747, H95698, |
| | | | | | W84692, R87845, T78493, F08462, |
| | | | | | T16643, AA210976, R13935, R25677, |
| | | | | | H50912, AA349344, AI302317, Z99411, |
| | | | | | F07877, AA643729, R52724, R43750, |
| | | | | | AA522619, F02068, R43495, R41527, |
| | | | | | H52035, AI092517, AI291295, AI570476, |
| | | | | | AI951902, AI906668, AI906666, H38986, |
| | | | | | AI553790, AW268395, AI312547, |
| | | | | | AW450243, AI681390, AI344432, |
| | | | | | AI343814, N44903, W84640, AA614791, |
| | | | | | AJ245820, AJ245821, AJ245822, and |
| | | | | | AF131749. |
| HBIOZ10 | 227 | 1143756 | 1-559 | 15-573 | |
| HTLEJ11 | 228 | 1085651 | 1-956 | 15-970 | M62294. |
| HAWAM69 | 229 | 1207835 | 1-2944 | 15-2958 | AW385785, AA430300, AA541688, |
| | | | | | AA776700, AA679037, AA573270, |
| | | | | | AA126614, AL045796, AI268236, |
| | | | | | AA682186, AI963606, AI926591, |
| | | | | | AW192904, AI924827, AI922590, |
| | | | | | AI032288, AI375804, AA705172, |
| | | | | | AW081541, AA694514, AI130883, |
| | | | | | AI800450, AA931725, N25288, AI270687, |
| | | | | | AI366906, AW058362, AI683319, |
| | | | | | AA436891, R59176, AI597744, AI446542, |
| | | | | | W69578, AW453004, AI911821, |
| | | | | | AI095665, AA687634, AI130013, W69579, |
| | | | | | R59232, AA722782, AI587015, AI191864, |
| | | | | | AA398533, AA676733, AI476374, |
| | | | | | AA115447, AA554327, AA759328, |
| | | | | | AW242281, AI139766, AA042956, |
| | | | | | AA886732, AA664356, AA358590, |
| | | | | | AA135916, AI565897, AW304844, |
| | | | | | AA618576, AA916086, R66162, H71919, |
| | | | | | AA363371, AA430199, AI370031, Z44808, |
| | | | | | AA320329, AI934183, AA393105, |
| | | | | | AI004140, AA135927, AA042816, |
| | | | | | AW452852, AA135926, H44791, |
| | | | | | AA813424, AI865731, T35731, R42647, |
| | | | | | R27785, T32691, AI857286, AW008428, |
| | | | | | AI631988, AA115446, AA678468, |
| | | | | | AW075384, AI569918, H44790, AI918635, |
| | | | | | AA601518, AA603858, H42641, AI745618, |
| | | | | | AI445766, R27874, AI939990, AA677131, |
| | | | | | AW364938, AI569374, AW029062, |
| | | | | | AL042382, AL119511, AL119457, |
| | | | | | AL042544, AL119399, AL079794, C01947, |
| | | | | | AL043152, AI863382, AL043168, |
| | | | | | AL119324, AI670009, AI698391, |
| | | | | | AL036403, AI358701, AI909661, |
| | | | | | AL046944, AL037454, N42321, |
| | | | | | AW082113, AI886124, AI590120, |
| | | | | | AI978703, AI525669, AW167228, |
| | | | | | AI525653, AI254727, AI637584, |
| | | | | | AI783504, AL079963, AI557808, |
| | | | | | AL119863, AI609409, AA127565, |
| | | | | | AW020397, AI247193, AI889189, |
| | | | | | AL039086, AI866608, AI590686, |
| | | | | | AL045500, AL121306, AI612885, |
| | | | | | AI364788, AI433157, AI702073, |
| | | | | | AI888661, AW238730, AL043975, |
| | | | | | AI541027, AI633125, AI610357, |
| | | | | | AI673278, AL079741, AL121328, |
| | | | | | AW022682, AL045997, AI859991, |
| | | | | | AI686906, AI923989, AI621341, |
| | | | | | AI269862, AL042745, AI620284, |
| | | | | | AI915291, AW020419, AI340519, |
| | | | | | AW023338, AI522052, AI874166, |
| | | | | | AI866770, AI679550, AI284509, |
| | | | | | AI541056, AI801793, AW163464, |
| | | | | | AI280637, AI744243, AW104641, |
| | | | | | AA640779, AI537677, AL045163, |
| | | | | | AL041150, AI571439, AI538885, |
| | | | | | AI557238, AL121365, AW411235, |
| | | | | | AA493647, AI491842, AL080011, |
| | | | | | AI627988, AI340603, AL121270, |
| | | | | | AI623941, AI583578, AA420758, |
| | | | | | AI538850, AA420722, AI624693, |
| | | | | | AI499285, AL047100, AI590601, |
| | | | | | AI669864, AL110306, AW020592, |
| | | | | | AW051088, AW021717, AI554821, |
| | | | | | AI866573, AW161579, AI801325, |
| | | | | | AI539771, AI929108, AW162189, |
| | | | | | AW198090, AI521560, AI500662, |
| | | | | | AI619502, AI500659, AI285448, |
| | | | | | AI541048, AI538008, AW160916, D50977, |
| | | | | | AI500523, AW079654, AW162194, |
| | | | | | AI284517, AI500706, AI445237, |
| | | | | | AI491776, AW151138, AL036548, |
| | | | | | AW409775, AI922707, AI633493, |
| | | | | | AI620003, AI434256, AI591228, |
| | | | | | AL138386, AI284513, AI888118, |
| | | | | | AI859464, AW104056, AI582932, |
| | | | | | AW303089, AI582558, U77594, Y11587, |
| | | | | | S68736, AL050277, AF118094, I48978, |
| | | | | | AL133072, AR011880, AL122110, |
| | | | | | AL137550, Z97214, AF182215, I89947, |
| | | | | | AL122093, AF126247, AL133640, A91160, |
| | | | | | AF146568, AL133080, A93016, AL049382, |
| | | | | | AR029490, A08916, A08913, I48979, |
| | | | | | AF100781, Y10655, AF113694, AF177401, |
| | | | | | AL137479, AF207750, X56039, AL050393, |
| | | | | | AR034821, S61953, X82434, Y11254, |
| | | | | | AF079763, AF159615, AL050149, |
| | | | | | AL096744, A08910, A08909, A77033, |
| | | | | | A77035, Z82022, AL137294, AL117460, |
| | | | | | U35846, AF113019, AF114170, AL050024, |
| | | | | | AL137459, AL080126, A65341, I03321, |
| | | | | | AJ005690, AF090934, I33392, AL133075, |
| | | | | | I68732, X63410, I89931, X79812, M27260, |
| | | | | | I00734, I49625, E00617, E00717, E00778, |
| | | | | | E01614, E13364, A76335, AB007812, |
| | | | | | AL117435, A03736, AF057300, AF057299, |
| | | | | | X72889, AF139986, A57389, AL122049, |
| | | | | | A07588, AF067728, AF111851, AF183393, |
| | | | | | AF091084, AL110221, AF090900, |
| | | | | | AL137548, A18777, AL049283, |
| | | | | | AL137560, X70685, AL133557, Z37987, |
| | | | | | AF090903, S78214, D83032, AF017437, |
| | | | | | Y16645, AF090886, I66342, AF104032, |
| | | | | | AR068751, U88966, AR038854, |
| | | | | | AF065135, AF087943, AL110197, |
| | | | | | AL133016, I09499, AL133113, A58524, |
| | | | | | A58523, AL122050, AL049430, AF113699, |
| | | | | | AL137271, E02349, I92592, AF026124, |
| | | | | | A08912, X65873, AL122121, AJ012755, |
| | | | | | AL137463, X81464, AF028823, A08908, |
| | | | | | AF069506, AL122100, AL137533, |
| | | | | | AF079765, AL137521, AF008439, |
| | | | | | AL117457, AL133558, AF017152, |
| | | | | | M96857, U80742, AF090901, U75932, |
| | | | | | E03348, X66862, AL137478, I17544, |
| | | | | | X63574, AF061943, AL080074, AL049300, |
| | | | | | AL049466, X84990, A93350, I30339, |
| | | | | | I30334, AL117394, AF106657, AL050138, |
| | | | | | AL122123, AL133560, AL133637, |
| | | | | | AF113689, X72387, U00763, AL137523, |
| | | | | | AJ003118, AL137557, AL137300, |
| | | | | | AL110225, AF081571, AL137705, L04504, |
| | | | | | X96540, I89934, AR013797, AF113690, |
| | | | | | AL137283, AF118070, AL110196, |
| | | | | | AL049314, AL049452, AR059958, |
| | | | | | AL137538, AJ238278, AL122098, |
| | | | | | AL050146, U78525, AR068753, |
| | | | | | AL137526, AJ000937, AL080158, E07108, |
| | | | | | AL133606, AF106862, AB019565, |
| | | | | | AF113677, I09360, AF097996, E06743, |
| | | | | | AL137648, AF031147, AL117585, |
| | | | | | AL137558, AL050108, AF090896, |
| | | | | | AL133010, U42766, X83508, AL137476, |
| | | | | | AF111112, AF111849, AL133665, |
| | | | | | AL133568, E15569, S76508, AF113691, |
| | | | | | AL137539, AL080124, L04849, A65340, |
| | | | | | AL137530, I42402, AL080159, AL117583, |
| | | | | | M86826, X92070, Y14314, AL050116, |
| | | | | | AF125948, AL137660, A23630, AL137488, |
| | | | | | AL050155, AF113013, AL049464, |
| | | | | | AF078844, X06146, AF100931, A86558, |
| | | | | | AF090943, X87582, U67958, AL122106, |
| | | | | | U87620, AF125949, L31396, AL080148, |
| | | | | | and AW664335. |
| HSCKD11 | 230 | 1056288 | 1-3714 | 15-3728 | AL037558, AA417129, AW021717, |
| | | | | | AL042365, AI440238, AI885989, |
| | | | | | AA641818, AI378123, AW088560, |
| | | | | | AI648699, AI673278, AI572717, |
| | | | | | AI559752, AW023338, AI280732, |
| | | | | | AW238730, AI538885, AI866608, |
| | | | | | AA805434, AI923989, AI249877, |
| | | | | | AW022636, AI697324, AL118781, |
| | | | | | AL120995, AA514684, AI349226, |
| | | | | | AL048323, AL079963, AI929108, |
| | | | | | AL048340, AI697420, AI784252, |
| | | | | | AI318280, AW151714, AI811192, |
| | | | | | AW022102, AW161098, AI565031, |
| | | | | | AW029457, AI471429, AI862880, |
| | | | | | AW163834, AI536836, AI950729, |
| | | | | | AI582932, AI521594, AW088903, |
| | | | | | AI862144, AI954183, AI288285, |
| | | | | | AL037592, AW118448, AI348777, |
| | | | | | AI335426, AW082532, AI537677, |
| | | | | | AI611743, AW166742, AW161579, |
| | | | | | AI567971, AI954422, AI633125, |
| | | | | | AI925404, AI809062, AI860027, |
| | | | | | AI815232, AW152182, N22276, |
| | | | | | AW162194, AI538716, AI345688, |
| | | | | | AW366372, AI334893, AI440260, |
| | | | | | AI241678, AI335214, AI493836, |
| | | | | | AI499285, AL041220, AI432644, |
| | | | | | AI798456, AI702091, AW021189, |
| | | | | | AW073697, AW083573, AI537261, |
| | | | | | AW089840, AI252023, AI586931, |
| | | | | | AW151132, F26535, AW020480, |
| | | | | | AL047344, AI340603, AI963668, |
| | | | | | AW161402, AI589004, AI473208, |
| | | | | | AI524654, AI621341, AW104141, |
| | | | | | AI338427, AI287233, AI349246, |
| | | | | | AA908294, AA420722, AI886123, |
| | | | | | AI623941, AI340519, AI690813, |
| | | | | | AW170787, AI254042, AI627714, |
| | | | | | AW051088, AW020381, AI680165, |
| | | | | | AI473536, AW020397, AI240978, |
| | | | | | AW079432, AI365256, AL036923, |
| | | | | | AI269862, AI635016, AL038605, |
| | | | | | AI368579, AI623736, AI500061, |
| | | | | | AI699020, AW129456, AW087336, |
| | | | | | AI289791, AI138480, AI567351, |
| | | | | | AW029216, AI927233, AW059828, |
| | | | | | AI866465, R39624, AI969641, AI589428, |
| | | | | | AW022699, AI915291, AW020419, |
| | | | | | AI470651, AL048496, AW169234, |
| | | | | | AI421328, AI587606, AI439452, |
| | | | | | AI539771, AW169604, AI540674, |
| | | | | | AI745329, AI282652, AW054931, |
| | | | | | AW020561, AI538829, AI887163, |
| | | | | | AI525653, AW129202, AI969655, |
| | | | | | AI610086, AI348854, AL121270, |
| | | | | | AI523806, AI432532, AI282930, |
| | | | | | AA602414, AW090768, H89138, |
| | | | | | AI873644, AW189473, AW162189, |
| | | | | | AI536601, AW079706, AW148356, |
| | | | | | AI345415, AI355779, AW074605, |
| | | | | | AI254420, AL110306, AI625467, |
| | | | | | AL045349, AA806719, AA833760, |
| | | | | | AI620056, AI591101, AW118237, |
| | | | | | AA736984, AI680280, AI538764, F27788, |
| | | | | | AA503384, AI623396, AW078895, |
| | | | | | AI868831, AL135024, AI758924, |
| | | | | | AA829061, W45039, AI472487, AI434223, |
| | | | | | AI289436, AI962858, AI673363, |
| | | | | | AW129230, AW194014, AW022300, |
| | | | | | AL039086, AL043981, AW090103, |
| | | | | | AI890907, AW025464, AW103628, |
| | | | | | AI554821, H43387, AW029186, AI499325, |
| | | | | | AW080766, AA808175, AL046942, |
| | | | | | AW090492, AI698391, AI863479, |
| | | | | | AI612885, AW087200, AI921244, |
| | | | | | AI804531, AA001397, AI340627, |
| | | | | | AL036705, AI677796, AW079572, |
| | | | | | AI696358, AI247293, AI452560, |
| | | | | | AW019985, AI620287, AI246319, |
| | | | | | AA764968, AJ243342, I72363, U12336, |
| | | | | | S53987, M30514, AL050116, AL137256, |
| | | | | | AL133080, I89934, AC005291, A65340, |
| | | | | | AF017437, AF200464, AF058921, |
| | | | | | AL133560, AF047716, AL122110, |
| | | | | | AF026008, AL050280, AF113676, A08910, |
| | | | | | A08909, M79462, U78525, I48978, |
| | | | | | Y16645, AL137258, AF124728, AL080148, |
| | | | | | AL137276, S36676, AJ005690, AL133113, |
| | | | | | I00734, AC004987, AL050393, U72620, |
| | | | | | E01356, AL080118, AF008439, AL133557, |
| | | | | | AF113690, AF090896, AF002672, |
| | | | | | AL133010, AF102578, AR038854, I89947, |
| | | | | | AF000167, AF082526, AF118094, L40363, |
| | | | | | A08913, AL137459, AL117460, |
| | | | | | AR034821, AL137550, AL137463, |
| | | | | | AF100931, A86558, AL133070, AL080159, |
| | | | | | U73682, X80340, U58996, X89102, |
| | | | | | X59812, AF043493, AF090934, Y13350, |
| | | | | | AF145233, AL110158, AF090901, E00617, |
| | | | | | E00717, E00778, AL122104, X62580, |
| | | | | | AF069506, AF183393, AF185614, I66342, |
| | | | | | AL050172, L13297, Y10936, A08912, |
| | | | | | Y07905, M92439, A08911, A08907, |
| | | | | | AF038847, I18358, I34395, AL080074, |
| | | | | | AL110228, AR068466, U88966, |
| | | | | | AL080057, S54890, I89931, AL133067, |
| | | | | | AL133084, X76228, AF097996, AF051325, |
| | | | | | S76508, X72387, U51587, AL137558, |
| | | | | | AL133623, I49625, AF106862, AF090923, |
| | | | | | I33391, AR029490, M85164, AF080622, |
| | | | | | AL122093, AL137479, AL122123, I79595, |
| | | | | | AF002985, AL137657, AF175903, E12580, |
| | | | | | AL137648, AL117629, AF158248, |
| | | | | | AF180525, I32738, AB008792, AL122118, |
| | | | | | U75604, AB008791, U42766, AF182215, |
| | | | | | Y13653, A91160, I28326, A77033, |
| | | | | | A77035, U68233, I92592, Z37987, A03736, |
| | | | | | A18777, A08916, AL117463, AL137478, |
| | | | | | AL122050, AL133081, AL117416, S77771, |
| | | | | | AF118558, AL133568, AR050959, |
| | | | | | AF111112, AF067790, M19658, |
| | | | | | AR020905, AL133104, AL137429, |
| | | | | | A08908, Y10823, AF065135, E12579, |
| | | | | | AF090900, U37359, X99717, AL080150, |
| | | | | | AR022283, S78214, AL049347, AF026816, |
| | | | | | AL136884, and X82397. |
| HDPLT62 | 231 | 1027241 | 1-2693 | 15-2707 | AI279417, AL079734, AA502991, |
| | | | | | AA410788, AI755214, AA643770, |
| | | | | | AW023111, AI754105, AI754567, |
| | | | | | AI805363, AW328331, AA632765, |
| | | | | | AL042373, AI254779, AA704393, |
| | | | | | AI962030, AA659832, AA507042, |
| | | | | | AI253376, AI380617, AI923052, |
| | | | | | AA524229, AA904275, AI460050, |
| | | | | | AA714110, AI345695, AL119247, N23913, |
| | | | | | AA572813, AW008169, AA470933, |
| | | | | | H45698, AA169245, AA477503, |
| | | | | | AA829036, AA535216, AA452887, |
| | | | | | AA809546, T71936, AI311647, AI278972, |
| | | | | | AI783911, AI674840, AW409710, |
| | | | | | AA581247, AI620585, AI754767, |
| | | | | | AA524616, AI114733, AI677655, |
| | | | | | AW265688, AI133552, AA618316, |
| | | | | | AI627614, AI491765, AW419389, |
| | | | | | AI053696, AA632993, AA601394, |
| | | | | | AI056046, T07225, AI270602, AA837686, |
| | | | | | AL120343, AW083934, AL135108, |
| | | | | | AW193493, AA714288, T74524, |
| | | | | | AI912401, AA228778, AI921765, R99034, |
| | | | | | AL041894, AI242011, Y18994, D50671, |
| | | | | | AP000031, AF053356, AC006333, |
| | | | | | AP000252, AL008718, AC004858, |
| | | | | | AC004999, AL049757, AL121653, |
| | | | | | AC006538, AC006449, Z82172, |
| | | | | | AC005751, AC005480, AB023049, |
| | | | | | U80017, U62293, AL049759, AL049830, |
| | | | | | Z81369, AC020663, AL034548, |
| | | | | | AC005057, AL096701, AC000004, |
| | | | | | Z95114, AL079295, U91326, AL035086, |
| | | | | | AL021977, AC002350, AC010582, |
| | | | | | U63721, AL023655, AL023553, |
| | | | | | AC005821, AP000134, AP000212, |
| | | | | | AP000116, AC004991, AC000353, |
| | | | | | AB003151, AC005031, AL031295, |
| | | | | | AC010205, AC005736, AL139054, |
| | | | | | AL133245, AC006480, AC005288, |
| | | | | | AF130343, AL022238, AC006057, |
| | | | | | AC004895, AC005363, AC007637, |
| | | | | | AP000304, AC005274, L11910, Z95118, |
| | | | | | AC005725, AF111168, AC007707, |
| | | | | | AC007041, AL031662, AC007216, |
| | | | | | AC004148, AF064858, AL031311, |
| | | | | | AC003042, AC005695, AC007688, |
| | | | | | Z97205, AC007283, AL031005, |
| | | | | | AC005104, AC005678, AF109907, |
| | | | | | AC005777, AC003007, AC007371, |
| | | | | | AP000688, AC006088, AC007450, |
| | | | | | AC003957, AL034420, AC006537, |
| | | | | | AL096791, AC009516, AL031276, Z99716, |
| | | | | | AC004905, AL049713, AL022723, |
| | | | | | U91318, AF001550, AC004859, |
| | | | | | AC004598, AC007774, AL021154, |
| | | | | | AC005037, AC007899, AC005067, |
| | | | | | AC005046, AC000118, AL132712, |
| | | | | | AL031770, AC005332, Z86061, Z98946, |
| | | | | | AL049776, AC005779, AP000044, |
| | | | | | AP000112, AL031779, AP000513, |
| | | | | | AC005365, AC004655, AC005291, |
| | | | | | AL135744, AL008582, AC004755, |
| | | | | | AC006344, AL022316, AP000344, |
| | | | | | AC006084, AC004408, AL080317, |
| | | | | | AC007686, AC006285, AL078638, |
| | | | | | AC004025, Z83840, AF196969, AC007731, |
| | | | | | AC005619, AC006199, AC004771, |
| | | | | | AL031281, AC004797, AC016025, |
| | | | | | AC006046, AF001549, AC007014, |
| | | | | | AC000026, AL121652, AC002352, |
| | | | | | AC000062, AC002431, AL020997, |
| | | | | | AC005041, AL132994, AJ246003, |
| | | | | | AC004526, Z84483, AC004890, |
| | | | | | AC005231, AC004883, Z84487, AP000065, |
| | | | | | AC004821, AC002558, AL009179, |
| | | | | | AC002059, AC007193, AC002544, |
| | | | | | AF196779, AC005081, AC004878, |
| | | | | | AL133163, AC008115, Z99755, |
| | | | | | AC005565, AC005899, Z95115, |
| | | | | | AC004834, AF190465, AL031768, |
| | | | | | AL035697, AL022336, AC005632, |
| | | | | | AL078581, AL022311, AC005409, |
| | | | | | AJ003147, AP000545, AC005005, |
| | | | | | AL035495, D84394, AC005911, |
| | | | | | AC000003, Z86090, AL121658, AL049869, |
| | | | | | AC007766, AC002364, AL035691, |
| | | | | | AL031230, AC002565, AC004129, |
| | | | | | AC008126, AL031123, AC005839, |
| | | | | | AC005207, L78810, AC005089, |
| | | | | | AC006160, AC005902, AC002477, |
| | | | | | AF124730, AC004650, AC005944, |
| | | | | | AC005519, AL031848, AC002351, |
| | | | | | AC002429, AC004832, AL023281, |
| | | | | | AC006012, AC005783, AL009173, |
| | | | | | AC004765, AC004601, AC005378, |
| | | | | | AL021453, Z98941, U95742, AL033376, |
| | | | | | AL121825, AL024498, AC006241, Z85996, |
| | | | | | AC006120, and AL021391. |
| HTPFX16 | 232 | 974296 | 1-470 | 15-484 | |
| HE9NO66 | 233 | 1079624 | 1-976 | 15-990 | AI732997, AA865818, AA977633, Z69734, |
| | | | | | AB035267, AB020741, and Z68339. |
| HSDJI44 | 234 | 1154068 | 1-2093 | 15-2107 | A38246, A11524, AR029497, E05333, and |
| | | | | | E00893. |
| HFXDP53 | 235 | 1126294 | 1-1567 | 15-1581 | AR001481. |
| HWADY66 | 236 | 734565 | 1-490 | 15-504 | AA923698, AI673803, AI302688, |
| | | | | | AF191838, AR016417, AF145705, |
| | | | | | AF191839, and AC000025. |
| HLDBC63 | 237 | 1144557 | 1-859 | 15-873 | AW374344, AI424750, H12370, R32561, |
| | | | | | H12318, R28631, AI638545, AI760745, |
| | | | | | L39211, L07736, U88294, and Z56143. |
| HFIVB68 | 238 | 978211 | 1-823 | 15-837 | AA332003, AB033033, AF182316, |
| | | | | | AF182317, and AL096713. |
| HTLAC56 | 239 | 1181355 | 1-836 | 15-850 | AA614273, AA149526, AA722818, |
| | | | | | AA151569, AI299133, AI150935, |
| | | | | | AA542982, AI360422, AI079938, |
| | | | | | AA603610, AA716009, AI751611, |
| | | | | | W79786, AI083848, M78943, H40867, |
| | | | | | T31238, AA662256, AA298393, |
| | | | | | AA297499, AA541718, W79587, and |
| | | | | | AI074815. |
| HSSAD41 | 240 | 753094 | 1-566 | 15-580 | AA149526, AA151569, AA722818, |
| | | | | | AA614273, AI299133, AI150935, |
| | | | | | AA542982, AI360422, AI079938, |
| | | | | | AA716009, AI751611, W79786, AI083848, |
| | | | | | H40867, M78943, AA603610, T31238, |
| | | | | | AA662256, W79587, AA541718, and |
| | | | | | AA298393. |
| HCFMT57 | 241 | 1218436 | 1-2155 | 15-2169 | AI452994, AW370315, AI333235, |
| | | | | | AI983346, AI811889, AA598963, |
| | | | | | AW370305, D81728, D81129, AA344996, |
| | | | | | R14748, AI699873, AC004687, AB014512, |
| | | | | | and AF039571. |
| HDAAV61 | 242 | 1188787 | 1-1319 | 15-1333 | AA314786, AA160847, AA158845, |
| | | | | | AA157440, AA083972, AA159380, |
| | | | | | AI762433, AW404501, AI191825, |
| | | | | | AW105372, AW386309, AA157878, |
| | | | | | AI140935, AI922109, AW386330, |
| | | | | | AA442139, AA159268, AA083866, |
| | | | | | AW390887, AA100183, AW390888, |
| | | | | | AA262414, AA041219, AA488548, |
| | | | | | AA158846, AA158270, AI187149, |
| | | | | | AW076076, AI167533, AA743207, |
| | | | | | AA837990, AA442140, AA488413, |
| | | | | | AF125532, Y11092, AL137565, |
| | | | | | AC007136, and Z25424. |
| HDPKD75 | 243 | 1096253 | 1-623 | 15-637 | AA923698, AL040000, Z21326, |
| | | | | | AR016417, AF191838, AF191839, and |
| | | | | | AF145705. |
| HTEON29 | 244 | 1126312 | 1-538 | 15-552 | AW004028, AA432290, AI968030, |
| | | | | | AW237673, AW138422, AA428635, and |
| | | | | | AA861634. |
| HSKAC24 | 245 | 1121800 | 1-497 | 15-511 | AF170301, AF170302, AF077659, and |
| | | | | | AF144573. |
| HTJAA71 | 246 | 1216498 | 1-1721 | 15-1735 | AW238721, AW265324, AW238371, |
| | | | | | AW238695, AW238323, AW084388, |
| | | | | | AF077831, and AF185276. |
| HTEKS20 | 247 | 1124378 | 1-1061 | 15-1075 | AI936596, AA868353, AI797296, |
| | | | | | AA725553, AI221970, AI073397, |
| | | | | | AA428462, AA429551, AA431190, |
| | | | | | AA629305, AA629047, AW235895, |
| | | | | | AI123443, AI808267, AA609412, |
| | | | | | AI914363, AA953895, AI214385, |
| | | | | | AA431516, AA911681, AA781953, |
| | | | | | AI825106, AA298758, AI215028, |
| | | | | | AA909534, AA723768, D10393, and |
| | | | | | S63991. |
| HE9TK49 | 248 | 1125192 | 1-1353 | 15-1367 | AA086273, AF126965, AF126966, |
| | | | | | AC004590, AF124351, AB012043, |
| | | | | | AF134985, AF134986, AF125161, |
| | | | | | AF027984, and AJ012569. |
| HCHAT01 | 249 | 1202275 | 1-2977 | 15-2991 | AL079756, W80383, AA570709, |
| | | | | | AA746031, AA316540, N24219, W78982, |
| | | | | | AA740804, M78765, AA985314, |
| | | | | | AW337818, AA348323, H23489, W01009, |
| | | | | | AW273022, F10250, AW050885, H30484, |
| | | | | | AI494441, AA732761, N41828, Z41805, |
| | | | | | D51145, AL041943, AW079303, Z46179, |
| | | | | | H20834, H12176, H90615, AA641974, |
| | | | | | N28433, N45481, T31584, F12634, |
| | | | | | AA342119, R43266, AW365055, |
| | | | | | AA459071, AA464017, AA464078, |
| | | | | | R43775, T78049, T31949, AA046221, |
| | | | | | AA477480, AW139948, AW372243, |
| | | | | | AA143521, AW372245, R17167, |
| | | | | | AI655751, AA496370, R43146, T31978, |
| | | | | | AA496647, R25017, AA348324, H46223, |
| | | | | | T35092, AW071171, AA150812, |
| | | | | | AI085437, N99421, AA342120, AA131786, |
| | | | | | R08999, R09622, AW020710, and |
| | | | | | AB014576. |
| HCEEN06 | 250 | 1150867 | 1-752 | 15-766 | AW249673, AI568057, AI762163, |
| | | | | | AW300914, AI760528, AI341537, |
| | | | | | AI685427, AI572091, AI560209, |
| | | | | | AI453713, AI025000, AI761048, |
| | | | | | AI972204, AW170258, AW009963, |
| | | | | | AA864405, AI343959, AI912498, |
| | | | | | AI079913, AI559574, AI418784, |
| | | | | | AI438969, AI559101, AI973222, |
| | | | | | AI660152, AW016547, AI986363, |
| | | | | | AA806938, AI656111, AW003957, |
| | | | | | AI018296, AW028203, AI652597, R52151, |
| | | | | | H27175, D20315, H27174, and H77974. |
| HDPKI83 | 251 | 883382 | 1-781 | 15-795 | AA287508, W15561, N80792, AA922507, |
| | | | | | and AF159356. |
| HSPBQ12 | 252 | 1152258 | 1-1130 | 15-1144 | W02910, AA282287, N72351, AA829957, |
| | | | | | AW205583, AW408526, AA282483, |
| | | | | | W86878, AA249705, R97467, AI090365, |
| | | | | | AB014536, and AF077226. |
| HPCID78 | 253 | 886915 | 1-793 | 15-807 | |
| HDTKQ14 | 254 | 886936 | 1-541 | 15-555 | AL023653, AL049683, AL359542, |
| | | | | | AL359542, and AL359542. |
| HRACK83 | 255 | 888037 | 1-566 | 15-580 | AC005832. |
| HSIAO78 | 256 | 1156438 | 1-1990 | 15-2004 | AA527435, AW195324, AI653000, |
| | | | | | AW051613, AA514619, AI652532, |
| | | | | | AI675204, AA435717, AI796596, |
| | | | | | AI273289, AI659333, AI880669, |
| | | | | | AI826786, AA889355, AI174916, |
| | | | | | AW004627, AA377072, AA255838, |
| | | | | | AA397980, AA430523, AI565825, |
| | | | | | AI435476, AW001866, N52904, |
| | | | | | AA430608, AI760594, AA298640, |
| | | | | | W69756, AA594479, AI149418, AI911011, |
| | | | | | AI871818, N71537, AI089421, AA400874, |
| | | | | | AI038591, AA854839, AW044396, |
| | | | | | AI565867, AI131012, AI144119, H65663, |
| | | | | | N47230, AI732273, AW079534, |
| | | | | | AA847967, AW027678, AL044698, |
| | | | | | AA224892, T36269, AA009702, AI668849, |
| | | | | | AW182206, AA011130, N78511, |
| | | | | | AI676028, AA968449, AI984040, |
| | | | | | AA207018, AA658246, N73670, AI937659, |
| | | | | | R53598, AA453038, AA904224, |
| | | | | | AW293549, R48261, AA775033, H52314, |
| | | | | | R38289, H48428, AW083969, AA588654, |
| | | | | | F10880, AA578060, AW298073, W25831, |
| | | | | | AA889378, AA483944, AC002302, |
| | | | | | X62260, AC002288, AL035588, |
| | | | | | AC007425, AC004216, AF181896, |
| | | | | | AP000280, AP000038, AP000107, |
| | | | | | AF003528, AL033525, AC009498, |
| | | | | | AC007676, AC006080, AC005704, |
| | | | | | AL022328, AL118497, AC005332, |
| | | | | | AC007221, AL132987, AC005011, |
| | | | | | AC004874, U69570, Z48484, AB020858, |
| | | | | | AC004382, AC005213, AL049753, |
| | | | | | AC005771, AC004894, AC006023, |
| | | | | | AC003976, AL035668, D83402, |
| | | | | | AL139165, K03021, AC005046, |
| | | | | | AL035671, AC005184, AC005235, |
| | | | | | AC005183, AC005004, AC002541, |
| | | | | | AC005161, AL117338, AC004100, |
| | | | | | AF042484, AL117436, AC006354, |
| | | | | | AC004671, AC002546, AC007637, |
| | | | | | AC004129, AC004875, AL021877, |
| | | | | | AC006599, Z83822, AP000030, U61375, |
| | | | | | AC003693, AL009183, AC005922, |
| | | | | | AC004098, AC004982, Z75741, AJ006345, |
| | | | | | AL049821, AL035663, Z95114, AL080286, |
| | | | | | AL021395, AC008012, AC007529, |
| | | | | | Z84484, AF095703, AC006973, AL035696, |
| | | | | | AL078638, AP000252, AC007392, |
| | | | | | AC004061, AL117375, AL133162, |
| | | | | | AL031123, AP000466, AC007680, |
| | | | | | AC006952, Z82246, Z86062, AL035427, |
| | | | | | AF001550, AP000134, AP000212, |
| | | | | | AC011605, AL035106, AC006360, |
| | | | | | AC012088, AC000378, AC004984, |
| | | | | | AC005060, AL022159, AF001548, |
| | | | | | AC011594, AL135746, AB014079, |
| | | | | | AC004616, Z96074, AC007543, |
| | | | | | AC004015, AC004530, AL024508, |
| | | | | | AL031390, AC008069, AC005533, |
| | | | | | AC009263, AC000119, Z97876, |
| | | | | | AC004838, Z68324, AL031737, AP000088, |
| | | | | | AC006398, AC006139, AP000140, |
| | | | | | AP000146, AC005086, AP000228, |
| | | | | | AL132718, AC007198, AC007450, |
| | | | | | AP000299, AC004889, AC004055, |
| | | | | | AL035633, AC009275, AC004882, |
| | | | | | AL021707, AC007314, AC007156, |
| | | | | | AC006511, AC002563, AF152365, |
| | | | | | AP000514, AC005553, AC005690, |
| | | | | | AF047825, AC006367, AL034425, |
| | | | | | AL117347, AB020865, AL020989, Z84480, |
| | | | | | AC004888, AC005562, AP000113, |
| | | | | | AP000045, AC005529, AC005393, |
| | | | | | AC005538, AL021407, AL049839, |
| | | | | | U95740, AL031120, AC005701, Z75957, |
| | | | | | AC007617, AC000072, AC012083, |
| | | | | | AL008635, AC004381, L77569, AL031056, |
| | | | | | AC009464, Z84488, AC011700, |
| | | | | | AL110120, AL109914, AL035072, |
| | | | | | AC007262, AC007455, AL022162, |
| | | | | | U91319, AL118512, AL022329, |
| | | | | | AL121866, AL034555, AC005587, |
| | | | | | AL023806, AJ006995, AC006196, |
| | | | | | AC006213, AP000536, AC004968, |
| | | | | | AC006998, AC006064, AC007628, and |
| | | | | | AC002132. |
| HWAGS73 | 257 | 894404 | 1-587 | 15-601 | AF156884, AL096870, and AL096870. |
| HCMSL08 | 258 | 898203 | 1-1740 | 15-1754 | AI141895, AI201842, AI351867, |
| | | | | | AA251985, AA197256, F20444, |
| | | | | | AA194198, AI800873, F36894, F26457, |
| | | | | | AA482914, AA197255, AA482932, |
| | | | | | F30374, F32249, F27719, F32998, F01019, |
| | | | | | F01208, F31596, F34858, F00856, F29622, |
| | | | | | AA194227, F29621, F36047, AA016148, |
| | | | | | F00201, AA178901, F34860, AA176342, |
| | | | | | F35465, AA252091, F21999, AA192776, |
| | | | | | AI023647, F34620, S73775, U93291, |
| | | | | | M15747, M22717, M22712, M20142, |
| | | | | | M22714, and M22713. |
| HLWFN63 | 259 | 1101533 | 1-3089 | 15-3103 | AA707313, AI880426, AI684827, |
| | | | | | AI744551, AI307796, AA101249, |
| | | | | | AI284152, AA007399, N98643, AI375268, |
| | | | | | N66095, R71685, R02817, AA085724, |
| | | | | | AI221876, AI061056, AW207571, |
| | | | | | AA111956, AI460369, AI333887, |
| | | | | | AA594062, R18624, R62793, W22434, |
| | | | | | AW007868, AA776586, T70023, R71720, |
| | | | | | H70803, AA101290, AA323135, |
| | | | | | AA029721, AA320669, AI193496, R07828, |
| | | | | | AA007478, AI915644, AI932703, T69946, |
| | | | | | R62792, AA029660, AI859215, AA205667, |
| | | | | | AI625446, AI273982, AB018333, and |
| | | | | | AC006599. |
| HPWAY10 | 260 | 1128033 | 1-1154 | 15-1168 | AI027613, AA332875, AW367440, |
| | | | | | AW376896, AA330257, AL042522, |
| | | | | | AW367550, AW304212, H80390, |
| | | | | | AA447076, AI923485, AW316546, |
| | | | | | R08512, AB023178, Z30174, AC007676, |
| | | | | | AC007842, AC004696, AC005498, |
| | | | | | AB021641, and X78933. |
| HOUDH19 | 261 | 1153909 | 1-392 | 15-406 | AW207457, AI084622, AI392839, |
| | | | | | AA628082, AA534387, AW243188, |
| | | | | | AW129204, AI695812, AI572814, |
| | | | | | AI948743, AA651748, AA301865, |
| | | | | | AW371758, AC007842, and AC005614. |
| HDPFF24 | 262 | 1194719 | 1-1774 | 15-1788 | AI279875, AW369718, AI800428, |
| | | | | | AI566117, AA446945, AI246362, |
| | | | | | AA565728, AI436697, AA443369, |
| | | | | | AI761945, AW237445, AI889318, N66534, |
| | | | | | AW103788, N52334, AW302153, |
| | | | | | AW131719, AA588564, AA261806, |
| | | | | | H56725, AA199832, AA287107, |
| | | | | | AW419044, AI015242, AI807571, T80574, |
| | | | | | AI929099, N75104, AI269178, AA207149, |
| | | | | | AA912487, AA086082, AA780112, |
| | | | | | AI928828, R38930, AW450464, |
| | | | | | AA766626, AI904377, AA086081, |
| | | | | | AA365879, N88094, R68759, AA662606, |
| | | | | | AA281290, AA577126, R58834, H67457, |
| | | | | | D58175, N87549, H56648, T03486, |
| | | | | | AA261992, N28632, and AI913676. |
| HWLFH94 | 263 | 1152278 | 1-1268 | 15-1282 | AI339104, AA861042, AA134985, |
| | | | | | AA868144, AA134946, AI626100, |
| | | | | | AA922724, AA535447, AA308766, |
| | | | | | AA056635, D25742, AA916634, |
| | | | | | AA551763, AA873574, AW192836, and |
| | | | | | AR044148. |
| HWMBM13 | 264 | 1152283 | 1-879 | 15-893 | AI339104, AA861042, AA134985, |
| | | | | | AA868144, AA134946, AI626100, |
| | | | | | AA922724, AA535447, AA056635, |
| | | | | | AA308766, D25742, AA916634, |
| | | | | | AA551763, AA873574, AW192836, and |
| | | | | | AR044148. |
| HFIUE75 | 265 | 1172525 | 1-1596 | 15-1610 | AA745592, AW408392, AA780791, |
| | | | | | AI680317, AA205127, R06019, |
| | | | | | AW074511, T76970, T86065, AI709216, |
| | | | | | T77135, R05922, T85884, R77022, |
| | | | | | AA730855, C14389, C15076, R65976, |
| | | | | | D81026, D59467, D80164, D81030, |
| | | | | | D59787, D80166, D59619, D59502, |
| | | | | | D80210, D80240, D80212, D80219, |
| | | | | | D80188, D80022, D59859, D51423, |
| | | | | | C14331, D51799, D80253, D80043, |
| | | | | | D59610, D58283, D80195, D80391, |
| | | | | | D59275, D80227, D57483, D80366, |
| | | | | | D80193, D80196, D59889, D59927, |
| | | | | | AA305409, D80241, D50995, D80251, |
| | | | | | D80269, D80038, D50979, D80522, |
| | | | | | C14429, D80024, AW177440, D51022, |
| | | | | | D80045, AA305578, D51060, D80378, |
| | | | | | C14014, AW378532, T03269, C75259, |
| | | | | | AW178893, D80248, T11417, D80133, |
| | | | | | AW179328, AA514188, AA514186, |
| | | | | | AW377671, D80134, D80268, AW177501, |
| | | | | | D51250, AW177511, C05695, AW360811, |
| | | | | | AW178762, D58253, AW369651, C14077, |
| | | | | | AW352158, AW178775, D59373, |
| | | | | | AW176467, AW375405, AW352117, |
| | | | | | AI910186, F13647, D80439, D80132, |
| | | | | | D80247, AW366296, AW360844, |
| | | | | | AW360817, AW375406, AW378534, |
| | | | | | AW179332, AW377672, AW179023, |
| | | | | | AW178905, D81111, AW378540, C06015, |
| | | | | | D51213, D80302, AW352171, AW377676, |
| | | | | | AW178906, AW352170, AW177731, |
| | | | | | AW178907, AW179019, AW179024, |
| | | | | | AW360834, AI905856, AW177505, |
| | | | | | AW360841, Z21582, AW179020, |
| | | | | | AW178909, D80157, AW177456, |
| | | | | | AW179329, AW178980, AW177733, |
| | | | | | AW378528, AW178908, AW178754, |
| | | | | | AW179018, D80014, AW352174, C14227, |
| | | | | | AW179004, AW179012, AW178914, |
| | | | | | AW378525, D59627, D51103, D51759, |
| | | | | | AW177722, AW177728, T02974, |
| | | | | | AW179009, AW367967, D59503, |
| | | | | | AW178774, AW178911, AW378543, |
| | | | | | D58246, AW352163, D51097, D80258, |
| | | | | | D59653, AW352120, AA285331, |
| | | | | | AW178983, D58101, AW178781, T48593, |
| | | | | | D80064, AW177723, D45260, D80168, |
| | | | | | H67854, C03092, AI557774, AW177508, |
| | | | | | C14975, AI535850, D80949, AW367950, |
| | | | | | D51079, H67866, AW378533, C14407, |
| | | | | | AA809122, AI525917, C14344, AI525923, |
| | | | | | AW178986, AW177497, D51221, |
| | | | | | AI535961, T03116, D80228, AW177734, |
| | | | | | D59317, D59474, C14973, AI525920, |
| | | | | | AA514184, D59551, C14298, C14957, |
| | | | | | D45273, AI525215, D60010, AI535686, |
| | | | | | D50981, AI525235, D60214, AW378539, |
| | | | | | AI525227, C14046, AI525912, D51053, |
| | | | | | AI557751, T03048, AI525242, AW378542, |
| | | | | | AR018138, A62298, A84916, A62300, |
| | | | | | AJ132110, AF058696, AR008278, A25909, |
| | | | | | X67155, D26022, Y17188, AB028859, |
| | | | | | A67220, D89785, A78862, D34614, |
| | | | | | D88547, Y12724, X82626, A82595, |
| | | | | | AR025207, AB002449, A94995, |
| | | | | | AR060385, AR008443, AB012117, I50126, |
| | | | | | I50132, I50128, I50133, AR066488, |
| | | | | | AR016514, X68127, AR060138, A45456, |
| | | | | | A26615, AR052274, A85396, AR066482, |
| | | | | | A44171, A85477, A30438, Y09669, |
| | | | | | I19525, A43192, A43190, AR038669, |
| | | | | | A86792, I18367, AR066487, I14842, |
| | | | | | X93549, AR066490, AR008277, |
| | | | | | AR008281, U87250, D88507, AR054175, |
| | | | | | D50010, Y17187, A63261, AR008408, |
| | | | | | AR062872, A70867, AR016691, |
| | | | | | AR016690, U46128, U79457, D13509, |
| | | | | | AR060133, A64136, A68321, I79511, |
| | | | | | AF135125, AF123263, AR032065, and |
| | | | | | AR008382. |
| HNTCP13 | 266 | 1182313 | 1-2243 | 15-2257 | AA463847, AI479379, AW273740, |
| | | | | | AI740675, AI922082, AW009462, |
| | | | | | AI014722, AA463334, AI073540, N95224, |
| | | | | | AA007373, AI190238, AI798079, |
| | | | | | AA476563, AA670286, H02882, N92851, |
| | | | | | AA652716, H45475, W25554, AA774170, |
| | | | | | AW016339, H45576, AI370125, H03781, |
| | | | | | AW119159, AI811794, H20952, |
| | | | | | AA853882, AA853883, AI471060, |
| | | | | | AW382128, AW371996, W21053, H20991, |
| | | | | | AA368628, AW138258, AA476448, |
| | | | | | AA876335, AA788825, AF037447, and |
| | | | | | AC004486. |
| HB1BQ89 | 267 | 1175111 | 1-2849 | 15-2863 | AA496424, AW296705, AA292435, |
| | | | | | AA768388, AI359369, AA136659, |
| | | | | | AA435941, AW192609, AI361569, |
| | | | | | N62073, AA136739, AA411140, AI940074, |
| | | | | | AA101178, H09588, AA419044, AI358988, |
| | | | | | AA399613, AA323662, AL118665, |
| | | | | | AI268044, AA436039, H09587, AA627787, |
| | | | | | N55651, AA325534, T15506, AA082253, |
| | | | | | AA423798, AA904377, Z41610, R19206, |
| | | | | | F01655, F11248, R44468, C00466, Z42117, |
| | | | | | N77119, F08911, AA767800, AI418714, |
| | | | | | F05395, T35421, and AB007925. |
| HWBEG18 | 268 | 1169125 | 1-448 | 15-462 | AI114866, AI500518, AW327796, |
| | | | | | AW328350, AI755116, AW328609, |
| | | | | | AW410322, AW409642, AI754439, |
| | | | | | AW409590, AI754460, AI287514, |
| | | | | | AA551550, AA483482, AW205951, |
| | | | | | AA535393, AI201181, AI699829, |
| | | | | | AW409683, AW328376, AW328614, |
| | | | | | AW087373, AI827247, AW328444, |
| | | | | | AW327862, AW328440, AW328380, |
| | | | | | AW007896, AI971783, AW328007, |
| | | | | | AI628924, AI610070, AW080272, |
| | | | | | AW134985, AI440000, AA603360, |
| | | | | | AA501684, AI560651, AI559540, |
| | | | | | AA574413, AI818460, AA854768, |
| | | | | | AI754142, AA283266, AI497632, |
| | | | | | AA772414, AA496883, AA679713, |
| | | | | | AI050044, AI619744, AI339813, |
| | | | | | AW250421, AI274211, AW020501, |
| | | | | | F32918, AA579416, AA652660, AI567937, |
| | | | | | AA632536, AI831479, AI186976, |
| | | | | | AI151481, AW328320, AA877933, |
| | | | | | AI185119, AA513486, AI620681, |
| | | | | | AI690593, AA558105, AA610650, |
| | | | | | AA632560, AI922235, AA843775, |
| | | | | | AI924171, AI961721, AW250755, |
| | | | | | AW090148, AA491636, AI338728, |
| | | | | | AI123375, AW081336, AW090155, |
| | | | | | AI539209, AI890302, AW137738, |
| | | | | | AA847963, AA632723, AW007719, |
| | | | | | AA757769, AI573062, AA886011, |
| | | | | | AW245791, AI028444, AI863898, |
| | | | | | AI439763, AA886913, AA508174, |
| | | | | | AI749978, AA863478, AW261931, |
| | | | | | AA714364, AI634383, AI191638, |
| | | | | | AI198771, AI719450, AI344453, |
| | | | | | AI718439, AI268677, AI253560, |
| | | | | | AW250772, AI796657, AI347293, |
| | | | | | AI619835, AA569292, AW169077, |
| | | | | | AI570813, AI697471, AI149358, |
| | | | | | AI355377, AA610275, AI565047, |
| | | | | | AI193415, AI571454, AW262848, |
| | | | | | AA954603, AA600356, AI674831, |
| | | | | | AW316876, AA536172, AI185211, |
| | | | | | AI660181, AW273029, AI818029, |
| | | | | | AW192285, AA580796, AI719806, |
| | | | | | AI813549, AW242012, AI620986, |
| | | | | | AI830017, AI478688, AI925379, |
| | | | | | AI683998, R02544, AI745129, AI491901, |
| | | | | | AW338471, AI582160, N91538, |
| | | | | | AW090784, AI610180, AI697356, |
| | | | | | AI660159, AI925537, AI224078, |
| | | | | | AI859783, AW028278, AA598891, |
| | | | | | AI281231, AI289421, AW105711, |
| | | | | | AW305195, AA908802, AW073669, |
| | | | | | AI800405, AI342580, AI432916, |
| | | | | | AW170472, AA513180, AA653476, |
| | | | | | AI272858, AI963461, W73177, AI620289, |
| | | | | | AI523503, AI891159, AI475307, F24388, |
| | | | | | N32326, AW008147, AI270199, AI924530, |
| | | | | | AA448266, N64026, AW118551, |
| | | | | | AI560707, F20364, AA776791, AI206373, |
| | | | | | AI189997, AI510744, AA723534, |
| | | | | | AI631303, AA991428, AI979037, |
| | | | | | AI689023, AA505910, AA304640, |
| | | | | | AI962912, AA879052, AW073952, |
| | | | | | AI673755, AI951247, AA737215, F21939, |
| | | | | | AW005146, AI624705, AA879000, |
| | | | | | AA662258, AW023162, AA609197, |
| | | | | | AA984855, AI983037, AI734902, |
| | | | | | AI921779, N32870, AI718498, AW170473, |
| | | | | | AI924173, N34014, AI860956, AI523495, |
| | | | | | AW166489, AI818256, N31753, AI583997, |
| | | | | | AI000938, AI749136, AI333494, |
| | | | | | AA580751, W85708, AW328378, |
| | | | | | AA580635, AW328608, AI439940, |
| | | | | | AI830217, AI924195, AA491865, |
| | | | | | AI986358, AA312014, AW440520, |
| | | | | | AI860497, AI557538, AI185035, W37825, |
| | | | | | AI160628, AW148607, H73192, |
| | | | | | AA888879, AW273989, M36072, |
| | | | | | AC000089, AJ224080, AC004217, X06705, |
| | | | | | X61923, X52138, AC002107, AB023058, |
| | | | | | AP000521, AF055066, AL022723, |
| | | | | | AC004192, AL034417, AJ224082, |
| | | | | | AC004172, AJ224081, X15013, AC000399, |
| | | | | | Z84469, D63790, AC005042, AL031736, |
| | | | | | AC004129, AL078595, AC007110, |
| | | | | | AB020653, AC002452, and Y17212. |
| HTAHB43 | 269 | 1221956 | 1-2344 | 15-2358 | R53155, AW374891, AA029227, |
| | | | | | AA010232, AA149376, AA077657, |
| | | | | | AA077229, AA077669, AA076731, |
| | | | | | AW405369, AW386712, AW386708, |
| | | | | | AA077893, AF139794, AA077980, |
| | | | | | AA077825, AA078429, AI768799, |
| | | | | | AI912020, AA077544, AI738591, |
| | | | | | AA076983, AA076893, AI125178, F01048, |
| | | | | | AW373785, AI963990, AB011110, |
| | | | | | AC004084, and AC004985. |
| HSYBX32 | 270 | 909846 | 1-216 | 15-230 | AA078429, AC004084, AB011110, |
| | | | | | AC004951, AC004951, AC004951, |
| | | | | | AC004084, AC004084, and AC004084. |
| HCEHE35 | 271 | 1124531 | 1-537 | 15-551 | AB019692. |
| HFCBB56 | 272 | 1204971 | 1-2144 | 15-2158 | AA547979, AI696793, AA847499, |
| | | | | | AI889995, AI279417, AA669155, |
| | | | | | AA833875, AA833896, AL036909, |
| | | | | | AW162288, AW237905, AA862183, |
| | | | | | AA019542, AW408767, AA491955, |
| | | | | | AA904211, AW265688, AI366555, |
| | | | | | AI620992, AI251034, AI250552, |
| | | | | | AI284543, AW303098, AI251203, F13749, |
| | | | | | AW407889, AW026305, AI251284, |
| | | | | | AI421950, AI628922, AA831426, |
| | | | | | AA916430, AA828834, AA339423, |
| | | | | | AI493583, AL038606, AA614214, |
| | | | | | AI223626, AI224619, AW005974, |
| | | | | | AI492579, AA572983, AL047247, |
| | | | | | AA864271, AA053463, AL042667, |
| | | | | | AL042670, T57767, AI254770, AW316599, |
| | | | | | AA600202, AA832016, AA565232, |
| | | | | | AI278372, AI791185, AI753969, |
| | | | | | AL022316, Z84469, AC007934, |
| | | | | | AC000025, AL122020, AF015262, |
| | | | | | AL049869, AJ229043, AL021977, |
| | | | | | AC009516, AC005800, AC004821, |
| | | | | | Z83844, Z83822, AL031681, AL033392, |
| | | | | | AC005726, AC007298, AL133163, |
| | | | | | AC002549, AC006001, AL034429, |
| | | | | | AC006530, AL031311, AP000558, |
| | | | | | AL034400, AP000310, AC002395, |
| | | | | | AL022067, AC006441, AC002565, |
| | | | | | Y07848, AC005531, AC005527, |
| | | | | | AC004991, AP000155, AC005871, |
| | | | | | AL049758, AL049761, AC005736, Z95114, |
| | | | | | AC005529, AL008631, AL031680, |
| | | | | | AL133353, AC002472, AC009509, |
| | | | | | AP000116, AC012384, AC007325, |
| | | | | | AL022322, AL139054, AP000501, |
| | | | | | AC000035, AP000704, AC005972, |
| | | | | | AP000210, AC004815, AC002477, |
| | | | | | AC005484, AC012085, AC011311, |
| | | | | | AL031659, AC002430, AC005300, |
| | | | | | AC005229, AL050318, AC004895, |
| | | | | | AL008731, AC006241, AC005089, |
| | | | | | Z95115, AC005243, AC007384, |
| | | | | | AC007242, AC005520, AC002492, |
| | | | | | AC016831, AC002312, AC003664, |
| | | | | | AC020663, AC002091, AC005088, |
| | | | | | AL049712, Z73359, AC002381, |
| | | | | | AC005876, AC005480, AC005837, |
| | | | | | AF165926, AL135744, AC005952, |
| | | | | | AC004263, AC005829, AC004494, |
| | | | | | AC005412, AL031657, AL022238, |
| | | | | | AP000030, AC005697, AL049872, |
| | | | | | AC004699, AC002300, Z94056, |
| | | | | | AL022315, AC005755, AP000132, |
| | | | | | AC008040, AC004883, AL020997, |
| | | | | | AC005670, AL022163, AC003684, |
| | | | | | Z98047, AC007546, AC007065, |
| | | | | | AC005231, AC005220, AL049874, |
| | | | | | AC004859, Z85986, AC016025, AF196969, |
| | | | | | Z86090, AL096768, AP000014, AL031587, |
| | | | | | AC004552, AC000026, AC005874, |
| | | | | | AF134471, AC005901, AF111168, |
| | | | | | AL031282, AC004921, AC005399, |
| | | | | | AL121658, AL049709, AL031848, |
| | | | | | AC004167, AL030996, AF064861, |
| | | | | | AL034420, AL035086, AL023877, |
| | | | | | AF111167, AC004659, AL132777, |
| | | | | | AC006160, AC003962, Z98884, |
| | | | | | AL022165, AC002350, AL031431, |
| | | | | | AC004884, AC006974, AL133243, |
| | | | | | AC005037, Z95331, AC005859, |
| | | | | | AL031295, AC007055, U91322, |
| | | | | | AC000003, AL096791, Z82189, |
| | | | | | AC004149, AC005667, AF001550, |
| | | | | | AF207550, AL035423, AL031591, |
| | | | | | AC008928, AC009946, AL121603, |
| | | | | | AC004383, AL009172, U91321, |
| | | | | | AC006065, AC008018, AC006285, |
| | | | | | AL096701, AC004812, AC007130, |
| | | | | | AC004231, AL133448, AF117829, |
| | | | | | AC007435, AC007227, AL121655, |
| | | | | | AC003043, AL022476, AC005011, |
| | | | | | AC005031, AC005722, AC005808, |
| | | | | | AL035555, AC006275, AL049829, |
| | | | | | AL078477, AL049538, AC005703, |
| | | | | | AC006958, AC007406, AC007631, |
| | | | | | Z95113, AC008179, AC005592, |
| | | | | | AC005295, U52112, AC002310, |
| | | | | | AC004675, AC005996, AC006013, |
| | | | | | AF205588, AF003626, AC002369, |
| | | | | | AC007308, AL031585, AC006377, |
| | | | | | AC007880, AP000694, AC007948, |
| | | | | | AC007563, AC007216, U52111, |
| | | | | | AC004865, AC004150, AC004084, |
| | | | | | AC005216, AL135783, AF088219, |
| | | | | | AC012330, Z83826, AL031588, |
| | | | | | AC004020, AC005377, AC005206, |
| | | | | | AP000088, AC002059, AC005358, |
| | | | | | AL031280, AL050341, Z97056, AC005754, |
| | | | | | AC004773, AL034406, AP000065, and |
| | | | | | AC000379. |
| HAMFL82 | 273 | 910074 | 1-489 | 15-503 | T78839, and AB029015. |
| HBXCM38 | 274 | 1174533 | 1-2161 | 15-2175 | AI752485, AI804792, AI439106, |
| | | | | | AI971133, AI991958, AI752484, |
| | | | | | AI432296, AI478420, AW082819, |
| | | | | | AI912373, R89026, AI554161, AA894797, |
| | | | | | AI752414, H13307, AI249165, R61527, |
| | | | | | N62403, R89727, N47856, AI689339, |
| | | | | | R61583, AI368569, AI984780, H44175, |
| | | | | | AA219502, T32963, AI802627, AI752415, |
| | | | | | AW295386, AA985168, H06745, R40750, |
| | | | | | M79099, AA203312, R00511, A91842, |
| | | | | | A91846, A91844, and A91848. |
| HLHCR16 | 275 | 910123 | 1-3790 | 15-3804 | AA402528, AI379350, AA716107, |
| | | | | | AI123557, AI127175, AA234106, |
| | | | | | AA234698, AI039768, N77999, AI580137, |
| | | | | | AA424560, AA419490, AI334141, R71349, |
| | | | | | AI224976, AI417798, AI080508, N58410, |
| | | | | | AI818475, AA424657, N91089, AA399612, |
| | | | | | AI144265, AA399137, AI498363, |
| | | | | | AA410986, AA235306, AA399148, |
| | | | | | AW292497, AI249102, W86869, |
| | | | | | AA115407, H81257, AI077499, H00194, |
| | | | | | H45499, R01206, AW104245, AA234880, |
| | | | | | AA367417, AA852175, F05822, |
| | | | | | AA853077, AA852176, R82875, H81245, |
| | | | | | AA298421, R71350, R22096, H81585, |
| | | | | | AI985171, T49265, H81591, AA115408, |
| | | | | | R64037, T54283, AI492930, AI492932, |
| | | | | | R82876, R81695, R33935, R34138, |
| | | | | | R25630, H81595, R32025, R81696, |
| | | | | | T49264, R95688, R01319, R22040, |
| | | | | | Z21579, R33043, Z38741, AA514393, |
| | | | | | T97662, T34993, AA705441, D79105, |
| | | | | | R32078, H45500, AA707178, R30943, |
| | | | | | H81576, H81250, AI032721, AL079279, |
| | | | | | and I76197. |
| HE6GF02 | 276 | 1153883 | 1-599 | 15-613 | |
| HOUFT36 | 277 | 1162680 | 1-1842 | 15-1856 | AI190165, AI979249, AI917302, |
| | | | | | AI806483, AI633819, AI624750, |
| | | | | | AI147946, AI471728, AW196791, |
| | | | | | AI471611, AI985423, AA609421, |
| | | | | | AA256164, AA705338, N22327, |
| | | | | | AA811162, N75202, AW236751, |
| | | | | | AI922484, H79904, AA057615, H79810, |
| | | | | | AW362445, AW407702, AA542823, |
| | | | | | AF162130, AF161181, and AC005084. |
| HAGGF84 | 278 | 1197460 | 1-4064 | 15-4078 | Z99408, AI829910, AI004608, AI263188, |
| | | | | | AI262955, AA777512, AI625727, Z99409, |
| | | | | | AI436555, AI494561, AI085959, |
| | | | | | AI540110, AA481595, AA521313, |
| | | | | | AA283109, AL135568, AA988090, |
| | | | | | AA810697, AA233122, AI933149, |
| | | | | | AI754128, AA010623, AA806759, |
| | | | | | AI818869, AA809487, AA766911, |
| | | | | | AA316038, AA010624, AI750702, |
| | | | | | AA235130, W88865, AW296786, |
| | | | | | AI537382, AI432148, AA837093, |
| | | | | | AW385431, AW190812, AI033124, |
| | | | | | AI002712, W88760, AA283596, |
| | | | | | AA234956, AW295662, AA788729, |
| | | | | | N44843, AA777583, AA554176, |
| | | | | | AA889979, AA446963, AA448956, |
| | | | | | N55182, AI374973, AA447669, AI690467, |
| | | | | | AA283023, AA233206, AI073663, N33311, |
| | | | | | W27009, AA490727, R44959, AW135448, |
| | | | | | H12918, AA683306, AW021785, N93004, |
| | | | | | AA491218, W05278, AI393402, R37684, |
| | | | | | W30935, H54295, W45465, AA865595, |
| | | | | | AA765107, AA614573, AA767313, |
| | | | | | AA009487, H17018, AA767430, |
| | | | | | AW022593, R13824, AA736921, |
| | | | | | AA282705, H54372, AL120285, H67974, |
| | | | | | F00924, W56321, AA447819, W02795, |
| | | | | | AI124777, AA665370, AA687964, F00219, |
| | | | | | R20172, AW239099, N77241, H17017, |
| | | | | | AW262494, AA449684, AA481529, |
| | | | | | T39306, AI810957, W05327, AI750703, |
| | | | | | H87993, AW263323, F02227, F05900, |
| | | | | | Z33528, N75469, AA782796, AW262536, |
| | | | | | N75534, H05503, N37017, W56241, |
| | | | | | H54503, F02057, F05985, T40514, |
| | | | | | AA009901, F05811, AA322373, |
| | | | | | AA476641, R00735, R58669, H67654, |
| | | | | | AA732599, R00734, AA766461, AI381341, |
| | | | | | AW130224, R08857, AA330053, |
| | | | | | AA400645, AA730271, R08964, N88052, |
| | | | | | T19108, AI432714, AA424457, AI051190, |
| | | | | | W21355, AW148465, AF071569, D14906, |
| | | | | | U73504, AJ252239, J05072, X63615, |
| | | | | | L07044, AC004168, AC004056, U66064, |
| | | | | | X77192, X75774, X77193, X77195, |
| | | | | | X77194, L13406, L13407, L13408, |
| | | | | | AF059029, U50361, U73738, AF067728, |
| | | | | | AC006115, AC006112, AF107018, |
| | | | | | Y00093, AF179633, AC005156, |
| | | | | | AL133088, AW627616, AND AW630893. |
| HTTKP07 | 279 | 1119031 | 1-598 | 15-612 | AI640500, AA035703, AF130247, and |
| | | | | | AF165138. |
| HE9SE62 | 280 | 1171014 | 1-706 | 15-720 | AI765247, AW021430, AI822051, |
| | | | | | AI822104, AA010459, N70537, AL133567, |
| | | | | | and AB018312. |
| HUJAD24 | 281 | 1162674 | 1-1732 | 15-1746 | AI923935, AI336906, AI333385, |
| | | | | | AI312076, AW204515, and AI203953. |
| HWLFG75 | 282 | 1228123 | 1-2024 | 15-2038 | AI356559, AW163067, AI937030, |
| | | | | | AI652337, AW028706, AW157098, |
| | | | | | AW028808, AA004795, AA443325, |
| | | | | | AW005140, AW173645, R60229, |
| | | | | | AA442531, AI274924, AI810652, |
| | | | | | AI924004, AI572794, AI336556, |
| | | | | | AI672253, AI147260, AI872258, |
| | | | | | AI347103, AA467751, AA724594, |
| | | | | | AI280850, R52646, AA536110, H16834, |
| | | | | | AW450707, AW444512, AI376913, |
| | | | | | AA468349, AI807962, AA927875, R42625, |
| | | | | | AA609873, W28566, AI918962, |
| | | | | | AA578362, AA578062, R17389, C18386, |
| | | | | | R15375, AI016851, R60462, H16941, |
| | | | | | AI423739, AA467933, AA740299, |
| | | | | | AA025666, R42116, AA978110, AI423740, |
| | | | | | AW117517, AI886594, AA443338, |
| | | | | | AI857296, AW071349, AL048871, |
| | | | | | AL047763, AI702406, AI250293, |
| | | | | | AW117882, AI702433, AW195957, |
| | | | | | AI439087, AL119791, AI568870, |
| | | | | | AI433976, AI499463, AI538716, |
| | | | | | AI633419, AI349933, AI678302, |
| | | | | | AW274192, AI868831, AI498579, |
| | | | | | AI613017, AW162071, AI699857, |
| | | | | | AW071417, AW235035, AI540832, |
| | | | | | AI863014, AI628205, AW169653, |
| | | | | | AI249257, AW238730, AI349004, |
| | | | | | AI690835, AI224992, AI349772, |
| | | | | | AW301409, AW103371, AI866608, |
| | | | | | AL120736, AI564719, AL135661, |
| | | | | | AI866002, AI440426, AI590128, |
| | | | | | AI620284, AI275175, AI281779, |
| | | | | | AI433157, AL036146, AL036396, |
| | | | | | AI340582, AI521012, AI500077, |
| | | | | | AL040243, AI567351, AW074993, |
| | | | | | AI349645, AI500553, AW268253, |
| | | | | | AL045500, AI312152, AI345735, |
| | | | | | AI349937, AW089572, AI366549, |
| | | | | | AW068845, AI568854, AI597918, |
| | | | | | AI673256, AL038605, AI497733, |
| | | | | | AL047042, AI969601, AW148320, |
| | | | | | AI800453, AI800433, AI636456, |
| | | | | | AI635461, AL121270, AL036802, |
| | | | | | AI800411, AI682841, AL119049, |
| | | | | | AI610645, AI282655, AI597750, |
| | | | | | AI921379, AI758437, AI866887, |
| | | | | | AI432229, AI625079, AI690751, |
| | | | | | AI343112, AL036274, AI349256, |
| | | | | | AI567632, AI349614, AI570384, |
| | | | | | AI281773, AI434281, AI686926, |
| | | | | | AI687728, AI282903, AW303152, |
| | | | | | AL043326, AI207510, AI697137, |
| | | | | | AA640779, AI445432, AL121365, |
| | | | | | AA613907, AA572758, AL036759, |
| | | | | | AI679724, AI499393, AL038779, |
| | | | | | AI539771, AI811863, AL036980, |
| | | | | | AW074869, AW085799, AI475371, |
| | | | | | AI620868, AI815383, AL119748, |
| | | | | | AI569616, AI610307, AI436456, |
| | | | | | AI064830, AI631107, AI969567, |
| | | | | | AI608667, AI818683, AI687376, |
| | | | | | AI285735, AI439745, AI348897, |
| | | | | | AL046849, AL040169, AW002342, |
| | | | | | AL038778, AI920968, AI475134, |
| | | | | | AI469532, AI872711, AW301300, |
| | | | | | AI889203, AW168384, AI580984, |
| | | | | | AL047041, AI580190, AI873731, |
| | | | | | AI269696, AI680113, AI889839, |
| | | | | | AI671679, AI874109, AI753683, |
| | | | | | AI610756, AL120854, AI934036, |
| | | | | | AI609592, AI583316, AW166645, |
| | | | | | AW167776, AW080838, AI343059, |
| | | | | | AI446606, AI799199, AI499131, |
| | | | | | AW196141, AI255071, AI866780, |
| | | | | | AI919058, AI539153, AI687415, |
| | | | | | AI818206, AI345860, AI952114, |
| | | | | | AI687375, AL042753, AW087445, |
| | | | | | AI149592, AI906328, AI907070, |
| | | | | | AI804585, AI492540, AI469811, |
| | | | | | AI636445, AI345111, AI500659, |
| | | | | | AA508692, AI349226, AL080060, I48979, |
| | | | | | AL133016, Y11587, I89947, S68736, |
| | | | | | AR059958, AF090901, AF113691, |
| | | | | | AL110221, AL137527, AF113689, A93016, |
| | | | | | AF113676, S78214, AL049452, AL050393, |
| | | | | | AF090934, AF104032, AL133640, |
| | | | | | AF113013, AF118064, AF118070, |
| | | | | | AF078844, AF090900, AF090903, |
| | | | | | AF125949, AF113694, AF090943, |
| | | | | | AL049938, L31396, AJ242859, AL050146, |
| | | | | | AL133606, L31397, AL117460, AF113690, |
| | | | | | AL050149, AF106862, AL110196, X84990, |
| | | | | | AL117457, I89931, AF090896, A08916, |
| | | | | | AL050116, AL050108, AL050138, |
| | | | | | U42766, AL049466, AL133075, |
| | | | | | AB019565, AL049314, E03348, AL122050, |
| | | | | | AF113677, AF113019, AL080137, A08913, |
| | | | | | AF017152, AL080124, AL137283, |
| | | | | | AL133557, AL122093, AL050277, |
| | | | | | AL096744, I48978, U91329, AR011880, |
| | | | | | AL133093, AL122121, AF158248, X63574, |
| | | | | | AL049430, AF113699, AL137557, |
| | | | | | AL133565, Y11254, AL133080, X82434, |
| | | | | | Y16645, AJ000937, E07361, AL122123, |
| | | | | | AF091084, AF111851, AL137459, |
| | | | | | AF177401, AL117394, AC002467, |
| | | | | | AF146568, AL117583, AF125948, |
| | | | | | AF097996, AL110225, AL021393, |
| | | | | | AF079765, I49625, S61953, I33392, |
| | | | | | AF017437, A08912, U80742, U00763, |
| | | | | | AL050024, AL117585, AL049382, E07108, |
| | | | | | AL133560, AL137550, A65341, AF000145, |
| | | | | | A08910, AF095901, AL049464, AJ238278, |
| | | | | | E02349, AL049300, AL117435, AF067728, |
| | | | | | X70685, X72889, Z82022, AL122098, |
| | | | | | AF183393, AC006222, AC006371, |
| | | | | | AC007390, AF118094, U62317, A58524, |
| | | | | | A58523, AL137271, U72620, A08909, |
| | | | | | I03321, AC002464, AL137463, AL096776, |
| | | | | | I09360, AL137538, AL022147, AL133113, |
| | | | | | AC004200, AL122110, AL049283, |
| | | | | | A03736, AL080127, AC007172, A77033, |
| | | | | | A77035, E05822, A12297, AP000344, |
| | | | | | U35846, AF087943, AL137648, AL031281, |
| | | | | | X96540, AC010077, AF061943, A08911, |
| | | | | | X65873, U95738, AC004690, AC009233, |
| | | | | | AL110197, AC005291, X93495, |
| | | | | | AC007458, AC005057, AC006336, |
| | | | | | AF177767, L13297, AC004093, U67958, |
| | | | | | AL080159, AJ012755, U95739, AC005048, |
| | | | | | I42402, X98834, AL022723, AL049557, |
| | | | | | AF111112, A21622, AL031732, AL078630, |
| | | | | | AC006112, AC004686, U66059, A21625, |
| | | | | | Y09972, AL133072, AL137521, AF132341, |
| | | | | | AC007298, AL080154, M30514, |
| | | | | | AC003977, AF093117, and I17767. |
| HT3BG12 | 283 | 1092417 | 1-1050 | 15-1064 | AI028599, AA774434, AA905685, |
| | | | | | AI393349, AA991810, D80022, D80268, |
| | | | | | D58283, D80043, D80166, C14389, |
| | | | | | D50995, AW360811, AW178893, C14331, |
| | | | | | T03269, AW177440, D59927, D50979, |
| | | | | | D57483, D59859, D80195, D51423, |
| | | | | | D59619, D80210, D51799, D80391, |
| | | | | | D59275, D80240, D80253, D59787, |
| | | | | | D80227, D80522, D59502, AA305409, |
| | | | | | D80164, D59467, AW178906, D81030, |
| | | | | | D81026, D51060, AW377671, AW375405, |
| | | | | | C14429, D80188, D80212, D80193, |
| | | | | | D80196, D80219, AW179328, D80247, |
| | | | | | D80038, D80269, D80366, D59889, |
| | | | | | C15076, D80024, D80439, D80248, |
| | | | | | AA514186, D80045, AW366296, D59610, |
| | | | | | AW360844, AW360817, D80378, |
| | | | | | AW375406, AW378534, AW352158, |
| | | | | | AW179332, AW377672, AW179023, |
| | | | | | AW178905, AW378532, D51022, |
| | | | | | AW378528, AW178762, C14014, |
| | | | | | AA305578, T48593, D80133, AW176467, |
| | | | | | D80302, AW369651, AW178775, |
| | | | | | AW177501, D80241, AW177511, |
| | | | | | AW177731, AW352120, AA514188, |
| | | | | | AW352171, AW377676, D51759, |
| | | | | | AW352170, AW178907, AW179019, |
| | | | | | AW179024, D51250, AW178983, |
| | | | | | AW179020, D80251, AW360834, |
| | | | | | AW360841, D51103, AW178908, |
| | | | | | AW177505, C75259, AW352117, |
| | | | | | AW178909, AW177456, AW179329, |
| | | | | | D80157, AW178980, AW178914, |
| | | | | | AW178774, AW367967, AW177733, |
| | | | | | AW178754, AW179018, AW367950, |
| | | | | | AW179004, AW178986, AI905856, |
| | | | | | AW378543, AI910186, AW378540, |
| | | | | | AW177728, AW378525, AW352163, |
| | | | | | D80134, AW178911, D80132, AW178781, |
| | | | | | C06015, C05695, AW177734, AW378533, |
| | | | | | D51097, D45260, D58253, T11417, |
| | | | | | C03092, AW177723, H67866, H67854, |
| | | | | | D80064, AA809122, F13647, AA285331, |
| | | | | | C14227, AW378542, D59317, AW378539, |
| | | | | | AI525923, D80014, AA514184, AI525917, |
| | | | | | D59474, T03116, AI535686, AW360855, |
| | | | | | D58246, D81111, D80258, D59503, |
| | | | | | C14973, D80314, AI525920, AI525913, |
| | | | | | AI525227, D58101, AI525242, D59551, |
| | | | | | AI557751, AI557774, AI525912, |
| | | | | | AI525235, AI535959, AI525925, |
| | | | | | AB028951, AL122055, A78862, A62300, |
| | | | | | AJ132110, AR018138, X67155, A67220, |
| | | | | | D89785, D34614, A84916, A62298, |
| | | | | | AF058696, Y17188, D26022, A25909, |
| | | | | | AB028859, AR008278, I50126, I50132, |
| | | | | | I50128, I50133, A94995, Y12724, |
| | | | | | AR066488, A82595, D88547, AR008443, |
| | | | | | AR016514, AR060138, A45456, Y09669, |
| | | | | | A26615, AR052274, AR060385, |
| | | | | | AR066487, X82626, AB002449, A30438, |
| | | | | | A43192, A43190, AR038669, AR025207, |
| | | | | | D50010, Y17187, A70867, A63261, |
| | | | | | AR016691, AR016690, U46128, |
| | | | | | AR008408, AR062872, AR066490, |
| | | | | | D13509, AR060133, AR054175, I18367, |
| | | | | | A64136, A68321, I14842, AB012117, |
| | | | | | X68127, AR008277, AR008281, |
| | | | | | AR050680, AF123263, AR032065, |
| | | | | | U79457, and AR008382. |
| HTLJC71 | 284 | 922923 | 1-1738 | 15-1752 | AL039539, AL045443, AI336919, |
| | | | | | AA406128, AA405229, AL042307, |
| | | | | | AA431504, AA311249, AW086440, |
| | | | | | AA813520, AI240644, AA897733, |
| | | | | | AW268487, AA782009, AW172455, |
| | | | | | AI301209, AI014598, AA969918, |
| | | | | | AL041043, AA431178, AL039540, |
| | | | | | AA973051, AI221826, AL133030, |
| | | | | | AC009516, AP000552, AP000556, |
| | | | | | AP000557, AL117509, AC023490, |
| | | | | | AC023490, AC009516, AC009516, |
| | | | | | AC009516, AC018751, AC018751, |
| | | | | | AC018751, AC007957, and AC007957. |
| HCOMM05 | 285 | 1194701 | 1-1624 | 15-1638 | AI681802, AA534542, AL044632, |
| | | | | | AI912061, AI912050, AI298280, |
| | | | | | AI271683, AA587766, AA143726, |
| | | | | | AA565889, AI052230, AI983603, |
| | | | | | AI148467, AI028441, AI369272, |
| | | | | | AA079779, N93876, AI950520, |
| | | | | | AW024410, AI933105, AW138648, |
| | | | | | AI244430, AA583571, AA436795, |
| | | | | | AA158795, AA079751, AA595313, |
| | | | | | AA947417, R27340, AI373637, AI869920, |
| | | | | | AI244362, AW182724, AW381284, |
| | | | | | AI991003, AI250467, AI252203, |
| | | | | | AI252717, AW086414, AI252210, |
| | | | | | AI611516, AI345868, AI348932, |
| | | | | | AI308005, AI345138, AI310659, |
| | | | | | AI250541, AI311504, AW303046, |
| | | | | | AW301779, AI311180, AI250964, |
| | | | | | AI335365, AI250009, AI348928, |
| | | | | | AW086115, AI862506, AI305732, |
| | | | | | AI335130, AI311179, AI269522, |
| | | | | | AI305978, AI371584, AW301495, |
| | | | | | AI251162, AI254155, AI310038, |
| | | | | | AI311043, AI251045, AI335320, |
| | | | | | AI590436, AA158794, AW301422, |
| | | | | | AI224292, AI310178, AI284537, |
| | | | | | AI252538, D31472, AI053635, AI540612, |
| | | | | | AI685886, AI862262, AW268255, |
| | | | | | AW371409, W40369, AW071370, |
| | | | | | AI886550, AW371414, AI955911, |
| | | | | | AI024888, AA143739, AI254135, |
| | | | | | AI246935, AW177721, T35070, C00345, |
| | | | | | AW371416, AA902858, AW369434, |
| | | | | | AA581215, R34522, AA835966, |
| | | | | | AA083230, AW078797, AI475833, and |
| | | | | | R35706. |
| HSLJE54 | 286 | 1229928 | 1-2015 | 15-2029 | AA224020, AI906305, AA325180, |
| | | | | | AI282479, AW237905, AL038842, |
| | | | | | AW410354, AW069227, AW327624, |
| | | | | | AW340905, AA904211, AI634187, |
| | | | | | AW162288, AW023111, AI696793, |
| | | | | | AA584489, AI278972, AA558404, |
| | | | | | AI340641, AW275432, T05834, |
| | | | | | AA640430, AI635028, AI457313, |
| | | | | | AW272294, AA225406, AI076236, |
| | | | | | AA916430, AI340832, AI284640, |
| | | | | | AI358712, AL046409, AA640410, |
| | | | | | AI891080, AI280266, AL039041, |
| | | | | | AL039042, AW276827, AI753365, |
| | | | | | AI609972, H73550, AW021917, F13749, |
| | | | | | AA742815, AI192440, H71738, |
| | | | | | AW264901, AA829065, AA557982, |
| | | | | | AW271917, AW243793, AI362442, |
| | | | | | AA704393, AW303196, AA133472, |
| | | | | | AW274349, AI560085, AI755057, |
| | | | | | AA503018, AL079869, AI587583, |
| | | | | | AA747757, AW243831, AI587565, |
| | | | | | AI890324, AA832175, T47138, AI694784, |
| | | | | | AI246796, AI628859, AI570261, |
| | | | | | AW105346, AI250552, AA557945, |
| | | | | | AW301350, AI284543, AW408767, |
| | | | | | AW157731, AW193265, AA828619, |
| | | | | | AI620992, AW341903, AI859438, |
| | | | | | W63553, AA565911, AA182731, |
| | | | | | AW084445, AW068596, AA639155, |
| | | | | | AW029038, AI254770, AI245693, |
| | | | | | AI909199, AI570943, AA169245, |
| | | | | | AW328446, AI457597, AI251284, |
| | | | | | AI251034, AI251203, AI223626, |
| | | | | | AA502532, AI310464, AI431303, |
| | | | | | AA659832, AA772906, AA604831, |
| | | | | | AI251104, AI635196, H71678, AA653823, |
| | | | | | AA469327, AW078909, AF116548, |
| | | | | | AF116546, AF116547, X94152, AJ132661, |
| | | | | | E13557, M64755, AF116545, AF115343, |
| | | | | | AF115344, AL049779, AC005722, |
| | | | | | AP000692, AC007363, AL035462, |
| | | | | | AC007899, AC007707, AL049760, |
| | | | | | AL023553, AP000228, AP000140, |
| | | | | | AC007546, AC007201, AF129756, |
| | | | | | AP000555, AP000088, AC004552, |
| | | | | | AP001052, AC005529, AC006441, Z84487, |
| | | | | | AC005740, AC006285, AF107045, |
| | | | | | AC000118, AF031076, AL022718, |
| | | | | | AC009044, AC005233, AL031984, |
| | | | | | AL049548, AC005015, AL133485, |
| | | | | | AC005081, AC006130, X96421, |
| | | | | | AC007285, AC005837, AL008726, |
| | | | | | AC005881, AL031311, AC010205, |
| | | | | | AL049869, AC005409, AC005921, |
| | | | | | AC004778, AC005284, AF031078, |
| | | | | | AC003104, AF134726, Z85996, AC006965, |
| | | | | | AC005261, AC005363, AC009247, |
| | | | | | AF003626, AL109799, Z93023, Z95115, |
| | | | | | Z94056, AC005274, AC005527, |
| | | | | | AC005520, AC004534, AC002037, |
| | | | | | AC005049, AC005300, AF047825, Z93244, |
| | | | | | AC005899, AL049776, AC007253, |
| | | | | | AC005200, AL049576, AL035361, |
| | | | | | AL031432, AC003957, AC005598, |
| | | | | | AL031427, AC005620, AC004841, |
| | | | | | AC006312, AP000553, AF190465, |
| | | | | | AL031767, AC005004, Y18000, |
| | | | | | AC000068, AL096701, AL031286, Z93930, |
| | | | | | AC005775, AC005666, AC004922, |
| | | | | | AL122020, AC005288, AC005345, |
| | | | | | AL022320, M87889, AC004859, |
| | | | | | AL031681, AC009516, AF001549, |
| | | | | | AC006125, AC007327, Z93096, |
| | | | | | AC005011, AC005839, AC004525, |
| | | | | | AC007868, AL080243, AC004776, |
| | | | | | AL031774, Z98051, AL121658, L35532, |
| | | | | | AL031729, AF077058, AC005763, |
| | | | | | AC006040, AF030876, AC005694, |
| | | | | | AC004819, L78810, AL022336, Z82201, |
| | | | | | AL035461, X53550, AC005874, |
| | | | | | AF134471, AC006241, AC002070, |
| | | | | | U96629, AL109798, AF196969, |
| | | | | | AC007541, AL049743, AC003683, |
| | | | | | AC004598, AP001053, AC007649, |
| | | | | | AL031587, AC004743, AJ246003, |
| | | | | | AL031230, Z81314, AC005988, |
| | | | | | AC005189, AC007510, AC003665, |
| | | | | | AC003070, AF015160, AC008064, |
| | | | | | AC002394, AC007386, AP000065, Z97053, |
| | | | | | AC006101, AL009181, AC000353, |
| | | | | | AL022165, AC007406, AL080317, |
| | | | | | AC005962, AL021397, AC006064, |
| | | | | | AL049748, AL035530, AL109753, |
| | | | | | AC004659, AC005544, AC006468, |
| | | | | | AC006006, D83989, AC007435, |
| | | | | | AL049766, AC005229, AC005378, |
| | | | | | AL021918, AL023582, AC003035, |
| | | | | | AP000213, AL049823, AC005476, |
| | | | | | AC004211, AP000313, AP000135, X75335, |
| | | | | | AC004757, Z83846, I34294, AC002306, |
| | | | | | AC002477, AC002347, U57008, |
| | | | | | AP000303, AL035413, AL024508, |
| | | | | | AC002350, AC002365, AL008725, |
| | | | | | AC004760, AP000031, AC003080, |
| | | | | | AC004752, AB001523, AP000117, |
| | | | | | AC006372, AC004884, AC004668, |
| | | | | | Z95152, AL121603, and AC003010. |
| HTGED07 | 287 | 927411 | 1-489 | 15-503 | AA565765, AA565751, AI765474, |
| | | | | | AA085796, AA988365, AI380028, |
| | | | | | AI243840, AA976164, F05393, H13329, |
| | | | | | Z78407, T78216, D82559, AI868591, |
| | | | | | AL121852, AL117355, AB020724, |
| | | | | | AF092139, and AF110646. |
| HOFNH30 | 288 | 928365 | 1-362 | 15-376 | AF186380, and AF127138. |
| HWNCY05 | 289 | 1179767 | 1-968 | 15-982 | W40569, AW025860, D63226, AA334307, |
| | | | | | and AC006928. |
| HDPDA47 | 290 | 929193 | 1-1036 | 15-1050 | AW402583, AL049683, and AL023653. |
| HWMEV63 | 291 | 931154 | 1-440 | 15-454 | D13626, and AC078816. |
| HCFAT25 | 292 | 1052857 | 1-626 | 15-640 | AI287912, AI349658, AI792640, |
| | | | | | AF096300, AB014587, AC005035, |
| | | | | | AL137755, and U88984. |
| HHEQV39 | 293 | 1165420 | 1-873 | 15-887 | AA355773, and AA355926. |
| HHFJH79 | 294 | 1228195 | 1-2303 | 15-2317 | AW370568, AI684034, AI567533, |
| | | | | | AW361753, R17150, AA554360, |
| | | | | | AW245518, AW245843, AL046054, |
| | | | | | AI185853, AI814502, AI830917, |
| | | | | | AW027953, AI423947, AI761370, R77851, |
| | | | | | AW028779, AA338439, R59685, R25627, |
| | | | | | AI244276, AA587224, AI342419, |
| | | | | | AI377795, AW188290, AI361824, |
| | | | | | AI249713, AW008444, AW173497, |
| | | | | | Z45900, AA339575, AA232181, AI206821, |
| | | | | | AA142987, H11878, AA470821, AI933390, |
| | | | | | AI636179, AA317977, AA363355, |
| | | | | | AA373480, U79287, AC006942, and |
| | | | | | AL050131. |
| HUCOW17 | 295 | 1155190 | 1-1693 | 15-1707 | AI245305, AA307147, AW139688, |
| | | | | | W52616, AA416742, AA102287, R60274, |
| | | | | | AI085546, AI167698, R60782, H17001, |
| | | | | | AI400152, H15571, D78731, AI264789, |
| | | | | | H17000, H15631, AA192581, C03464, |
| | | | | | AI571949, AA872017, AI694004, |
| | | | | | AA486536, AA112946, AA533831, |
| | | | | | AA872016, and AI357709. |
| HFKIT06 | 296 | 1078092 | 1-1554 | 15-1568 | AA747315, AI392901, AI697980, |
| | | | | | AW295170, AA148983, AI283647, |
| | | | | | AA148982, AI393927, AA687243, R70140, |
| | | | | | H44117, H44044, AI783873, AI918219, |
| | | | | | R70141, AI741034, D80164, D80227, |
| | | | | | D51799, C14331, D80022, D59467, |
| | | | | | D80195, D59275, D59787, D59502, |
| | | | | | D80269, D59610, D58283, C15076, |
| | | | | | D59859, D81030, D80166, D51423, |
| | | | | | D59619, D80210, D80391, D80240, |
| | | | | | D80253, D80043, D80378, C14429, |
| | | | | | D80038, D80212, D50979, D80193, |
| | | | | | D80196, D80188, D80024, D80219, |
| | | | | | D59927, D80241, D57483, D50995, |
| | | | | | D80366, D59889, D51060, AA305409, |
| | | | | | AA305578, C14389, D80045, C14014, |
| | | | | | T03269, AW178893, C75259, AW177440, |
| | | | | | D51022, AW378532, D81026, D52291, |
| | | | | | AW352158, AA514188, D80134, |
| | | | | | AW179328, AW178775, D51250, D80251, |
| | | | | | D59695, AA514186, AW369651, C14407, |
| | | | | | D80522, F13647, D80248, D80133, |
| | | | | | D58253, D80168, AW178762, AW177501, |
| | | | | | AW177511, C14227, AW360811, |
| | | | | | AW378540, D81111, C14298, AI557751, |
| | | | | | AI910186, D80268, D80064, AW176467, |
| | | | | | C05695, AI905856, AW352117, |
| | | | | | AW375405, D80439, AW377671, D80247, |
| | | | | | D80302, Z21582, AW360834, AW366296, |
| | | | | | AW360844, AW360817, AW375406, |
| | | | | | AW378534, AW179332, AW377672, |
| | | | | | AW179023, AW178905, AW178906, |
| | | | | | D80132, D51103, AW352171, D51097, |
| | | | | | AW377676, AW352170, AW177731, |
| | | | | | AW178907, AW179019, AW179024, |
| | | | | | D59373, AA285331, D80157, AW177505, |
| | | | | | AW360841, AW179020, AW178909, |
| | | | | | AW177456, AW352120, AW179329, |
| | | | | | D51759, AW178980, AW177733, |
| | | | | | AW378528, AW178908, AW178754, |
| | | | | | AW179018, T11417, AA809122, C06015, |
| | | | | | AW177728, AW179004, AW179012, |
| | | | | | AW367967, AW178914, AW178774, |
| | | | | | AW378543, AW378525, T48593, |
| | | | | | AW178983, AW177722, AW352163, |
| | | | | | AW352174, AW179009, AW178781, |
| | | | | | AW178911, D59653, AI535686, D45260, |
| | | | | | D59503, AW177508, D58246, AI525923, |
| | | | | | AW367950, D59627, H67854, C03092, |
| | | | | | H67866, D58101, C14344, AW177723, |
| | | | | | AI557774, T03116, AW177497, D59317, |
| | | | | | AW178986, D80258, AI525920, D45273, |
| | | | | | AI525917, AI535850, D80014, C14973, |
| | | | | | AW378533, D51213, AI525227, D80228, |
| | | | | | D60214, D51221, D59551, D59474, |
| | | | | | AW177734, D60010, AA514184, N66429, |
| | | | | | C14957, C14046, AI525242, AI525235, |
| | | | | | Z33452, T03048, AI525925, AI525912, |
| | | | | | AI525237, AW378542, AW378539, |
| | | | | | AI525215, C16955, AF075060, A62300, |
| | | | | | A62298, A84916, AJ132110, AR018138, |
| | | | | | Y17188, A78862, X67155, A25909, |
| | | | | | D26022, A67220, D89785, D34614, |
| | | | | | AF058696, AB028859, D88547, X82626, |
| | | | | | AR008278, AR025207, I82448, A82595, |
| | | | | | Y12724, AR060385, AR008443, |
| | | | | | AB002449, AB012117, A94995, X68127, |
| | | | | | AR016808, I50126, I50132, I50128, |
| | | | | | I50133, A85396, AR066482, A45456, |
| | | | | | A44171, A85477, AR066488, I19525, |
| | | | | | AR016514, A86792, AR060138, A26615, |
| | | | | | AR052274, X93549, I14842, A30438, |
| | | | | | Y09669, A43192, A43190, AR038669, |
| | | | | | AR054175, AR066487, AR062872, |
| | | | | | Y17187, U46128, D50010, AR066490, |
| | | | | | AR008277, AR008281, A63261, I18367, |
| | | | | | Z82022, AR016691, AR016690, |
| | | | | | AR008408, D88507, A70867, U79457, |
| | | | | | I79511, D13509, A64136, A68321, |
| | | | | | AR060133, AF135125, AF123263, |
| | | | | | AR032065, AR060382, and AR008382. |
| HDTBY88 | 297 | 1104159 | 1-523 | 15-537 | AA868305, AI700890, AA789239, |
| | | | | | AI803004, AI694352, AA043382, F08474, |
| | | | | | R21498, AF112183, AF112184, and |
| | | | | | AC005354. |
| HWLHS82 | 298 | 1082268 | 1-1335 | 15-1349 | AI939391, AW401390, AI202873, |
| | | | | | AI869600, AW411117, AI142585, Z99396, |
| | | | | | H50446, AL119457, AL119324, |
| | | | | | AL036418, AL038837, AL037051, |
| | | | | | AL036725, AW392670, AA631969, |
| | | | | | AL119443, AL039074, AW384394, |
| | | | | | AL036924, AW372827, AW363220, |
| | | | | | AL036858, AL119497, AL119355, |
| | | | | | AL037094, AL038509, AL039564, |
| | | | | | AL119483, AL039085, AL119335, |
| | | | | | U46351, AL119319, AL036196, |
| | | | | | AL039156, AL039108, AL039109, |
| | | | | | AL039128, AL036190, U46349, |
| | | | | | AL119341, AL119484, AL119363, |
| | | | | | AL119391, AL042544, AL119399, |
| | | | | | AL036767, AL039659, U46350, |
| | | | | | AL119418, AL037082, AL119522, |
| | | | | | AL037526, U46341, AL134902, |
| | | | | | AL037639, AL119396, AL038531, |
| | | | | | AL042984, AL119496, U46347, |
| | | | | | AL037085, AL119444, AL036268, |
| | | | | | AL134533, AL039625, AL039648, |
| | | | | | AL037077, AL045337, AL119401, |
| | | | | | AL036238, AL037205, AL119439, |
| | | | | | U46346, AL134536, AL038447, |
| | | | | | AL042450, AL042909, AL043033, |
| | | | | | AL039386, AL039678, AL039629, |
| | | | | | AL119464, AL134538, AL042614, |
| | | | | | AL036733, AL039423, AL038520, |
| | | | | | AL042965, AL042975, AL039150, |
| | | | | | AL134525, U46345, AL040992, |
| | | | | | AL043029, AL042551, AL037027, |
| | | | | | AL036998, AL037615, AL038851, |
| | | | | | AL043019, AL037178, AL134542, |
| | | | | | AL043011, AL042542, AL036765, |
| | | | | | AL037726, AL036719, AL036191, |
| | | | | | AL039410, AL043003, AL036679, |
| | | | | | AL036774, AC005581, AC005781, |
| | | | | | AR060234, AR066494, A81671, |
| | | | | | AR023813, AR069079, AR064707, |
| | | | | | AB026436, and AR054110. |
| HDPNC96 | 299 | 1081629 | 1-720 | 15-734 | AA256100, and AB023182. |
| HCE5I78 | 300 | 1197899 | 1-3149 | 15-3163 | AA988953, N63548, AA663569, H15532, |
| | | | | | H38453, AA976078, N94873, H41422, |
| | | | | | H46380, R88023, N51089, H41541, |
| | | | | | H48172, AI423964, H38492, AI421373, |
| | | | | | R18083, AI208504, AI003013, R90757, |
| | | | | | R88479, H11023, R40487, R42977, |
| | | | | | H85702, AW207073, R87980, AA338374, |
| | | | | | H84794, H15589, AA325807, H10745, |
| | | | | | AA319224, AA338373, W28283, R13057, |
| | | | | | AA325143, N54215, AB023202, D13613, |
| | | | | | AC004551, D29965, U12571, and |
| | | | | | AC004465. |
| HISDS62 | 301 | 1159625 | 1-888 | 15-902 | AA126105, AA306119, W27339, D80253, |
| | | | | | D80366, D80043, D58283, D80188, |
| | | | | | D59502, D80166, D80195, D51423, |
| | | | | | D59619, D57483, D80210, D51799, |
| | | | | | D80240, D59859, D80391, D80212, |
| | | | | | D80219, D80227, D59889, D80196, |
| | | | | | D51060, D81030, D59927, D59610, |
| | | | | | D80269, D80038, D80022, D80024, |
| | | | | | D80193, D59275, C14389, D50979, |
| | | | | | D59787, D50995, D80241, C14014, |
| | | | | | C75259, D80045, C14429, D80164, |
| | | | | | D80378, D59467, T03269, C14331, |
| | | | | | C15076, AA305409, D80251, AW178893, |
| | | | | | D80134, AW177440, D51022, D80949, |
| | | | | | D51079, D58253, AW178775, AW179328, |
| | | | | | AA305578, AI905856, AW378532, |
| | | | | | D80248, D51097, D80522, AW352158, |
| | | | | | D81026, D59695, AA514186, AA514188, |
| | | | | | AW177501, AW177511, AW178762, |
| | | | | | D80268, AW360811, D80133, R58551, |
| | | | | | AW352117, AW375405, AW366296, |
| | | | | | AW377671, AW360844, AW360817, |
| | | | | | AW375406, AW378534, AW179332, |
| | | | | | AW377672, AW179023, AW178905, |
| | | | | | D80302, D80439, D80247, D80132, |
| | | | | | AW352171, AW377676, AW352172, |
| | | | | | AW178906, AW352170, AW177731, |
| | | | | | AW178907, W27700, AW179019, |
| | | | | | AW179024, AW177505, AW179020, |
| | | | | | AW178909, AW177456, AW179220, |
| | | | | | AW179329, AW178980, AW177733, |
| | | | | | AW378528, AW178908, AW178754, |
| | | | | | AW179018, AW179004, AW178914, |
| | | | | | AW367967, C14975, AW352174, |
| | | | | | AA033512, AI535850, AB007884, |
| | | | | | AJ250425, AJ132110, A62298, A84916, |
| | | | | | A62300, AR018138, Y17188, X67155, |
| | | | | | A67220, D89785, A78862, D26022, |
| | | | | | A25909, D34614, D88547, AR008278, |
| | | | | | AR025207, AF058696, X82626, |
| | | | | | AB028859, AB012117, A85396, |
| | | | | | AR066482, A44171, A85477, I19525, |
| | | | | | A86792, X93549, Y12724, AF135125, |
| | | | | | A94995, D88507, AR008443, U87250, |
| | | | | | AB033111, AR064240, I18367, AR066490, |
| | | | | | U87247, U79457, and X93535. |
| HDQDV69 | 302 | 1212566 | 1-2558 | 15-2572 | N63562, AI905612, N75655, N94726, |
| | | | | | AA297704, N64807, AI919048, AI567676, |
| | | | | | AI884404, AI797998, AI570067, |
| | | | | | AA765899, W27084, AW162314, |
| | | | | | AA632355, AI174827, AI281622, |
| | | | | | AW021674, AW085626, H86399, |
| | | | | | AA196994, AI745666, AI888050, |
| | | | | | AW029626, AA527633, AI150934, |
| | | | | | AW303052, AI065031, AI003391, |
| | | | | | AI049845, AW410844, AL121039, |
| | | | | | AW192930, AL138262, AI702049, |
| | | | | | AI307563, AI445699, AW162332, H47461, |
| | | | | | AI434103, T03928, AA015948, |
| | | | | | AW265468, AW328185, AA828840, |
| | | | | | AI538404, AA610644, W02419, AI547110, |
| | | | | | AI828721, AI370470, AI890857, |
| | | | | | AI744259, AI302350, AA847341, |
| | | | | | AI268465, AI003086, AI733523, |
| | | | | | AI064968, AW020612, AL118628, |
| | | | | | AW148821, H81270, AA568433, |
| | | | | | AI889177, AI857834, AI312614, |
| | | | | | AI280566, AA557945, AW149241, |
| | | | | | AI624191, AW327673, N49298, M77888, |
| | | | | | AA846046, AI744963, AW239465, |
| | | | | | AI311796, AI003068, AL044966, |
| | | | | | AA748071, AI791659, AI590404, N55076, |
| | | | | | H53109, AA947352, AA814719, AI801563, |
| | | | | | AA525953, AA199582, AA598608, |
| | | | | | AA280886, AI926656, AW439224, |
| | | | | | AI167715, AI207534, AA152398, |
| | | | | | AA167656, AW070901, AA133568, |
| | | | | | AI446574, AI905408, AI815770, |
| | | | | | AI934664, AA969564, AA846014, |
| | | | | | AI344906, AI318548, AA601712, |
| | | | | | AI819419, H48017, AW028376, |
| | | | | | AW419201, AI683079, AI376687, |
| | | | | | AA676462, AA313025, AA935827, |
| | | | | | AI969090, AI342863, AA715848, |
| | | | | | AA604149, AI754926, AA112864, |
| | | | | | AA018258, AA315052, AI350189, |
| | | | | | AI049999, AW152451, AI076729, |
| | | | | | AA774223, AA487053, AI800706, H62123, |
| | | | | | AI221027, AA669165, AA668727, |
| | | | | | AI039257, AI860423, AA601718, |
| | | | | | AA421536, AA602458, AA084439, |
| | | | | | AI620666, AI038990, AW131394, |
| | | | | | AA493245, AA526542, AL044701, |
| | | | | | T10218, AI872229, W45215, AW023975, |
| | | | | | AA525753, AL133768, AI921744, |
| | | | | | AI282488, AW275432, N53783, AI274480, |
| | | | | | AA729004, AI679759, AF169035, |
| | | | | | AF085233, Z98752, AL050338, AC005701, |
| | | | | | AC002375, AL133448, AC007537, |
| | | | | | AF196779, AC005519, AC004808, |
| | | | | | AC005822, AC004685, AC006079, |
| | | | | | AC004765, AC008044, U85195, |
| | | | | | AF176815, AE000658, AC006581, |
| | | | | | AC003665, AL049694, AP000076, |
| | | | | | AF207550, AC005089, AF001549, |
| | | | | | AC004033, AC002036, AC007731, |
| | | | | | AC005500, AC004263, AC004531, |
| | | | | | AC002558, AF109907, AF165926, |
| | | | | | AC006006, Z75744, U91327, AC003982, |
| | | | | | AP000692, AC005175, AC006511, |
| | | | | | AP001068, AL050321, AC005412, |
| | | | | | AC002310, AC005696, Z83844, AF024533, |
| | | | | | AJ003147, AC004019, AC004890, Z98941, |
| | | | | | AC002996, AC005632, Z84474, |
| | | | | | AL033527, AC005484, AL049538, |
| | | | | | AL049776, AC002472, AL022238, |
| | | | | | AF107885, AL021707, AC005399, |
| | | | | | AC006539, AL031680, AL109852, |
| | | | | | AC004997, AF104670, AP000030, |
| | | | | | AC012627, AC009247, AC009784, |
| | | | | | AC004233, AC004643, AC005920, |
| | | | | | AC002094, U93163, AL021579, |
| | | | | | AC005585, AC006597, AC006455, |
| | | | | | AC000353, AR036572, U91328, |
| | | | | | AC007036, AC005261, AC004771, |
| | | | | | AC005821, AC002477, AC005003, |
| | | | | | Z92542, AC004491, AP000555, AC007664, |
| | | | | | AL008712, AC007050, AL035445, |
| | | | | | AC006509, AL022323, AF064861, |
| | | | | | AL031864, Z80232, AL035420, AC005529, |
| | | | | | AC002351, AL022313, AC005914, |
| | | | | | AC004673, AP000251, AL121603, Z73979, |
| | | | | | AP000503, AC006071, U73636, |
| | | | | | AC007243, AC003108, AC004950, |
| | | | | | AC004703, AC004891, AC005393, |
| | | | | | AC000070, AL022241, AL121825, |
| | | | | | AL035079, AC007934, AC000082, |
| | | | | | AC004552, AC005859, AL035551, |
| | | | | | AL030996, Z83838, AC005598, AL031311, |
| | | | | | AC005365, AL080317, AC006277, |
| | | | | | AC002991, AP000365, AP000547, |
| | | | | | AF134726, AD000092, AL022334, |
| | | | | | AC005212, AL049839, AL109952, L78810, |
| | | | | | AC007227, AC005071, AC003037, |
| | | | | | AP000141, AC007993, AC005057, |
| | | | | | AC005355, AC003957, AC001052, |
| | | | | | AL136130, AP001046, AL049562, |
| | | | | | AC004099, Z84469, AL050318, M89651, |
| | | | | | AC005736, Z84719, AC010205, AJ011930, |
| | | | | | AL096701, AC000040, AP000116, |
| | | | | | AC005535, AC006013, AC004973, |
| | | | | | AC002306, AC005409, AP000049, |
| | | | | | AL024507, AC005081, AC000025, |
| | | | | | Z82201, AL022315, AC004751, D16583, |
| | | | | | AC007911, AC004500, AF043945, |
| | | | | | AL109627, AC005527, Z84480, AL021453, |
| | | | | | AP000309, AC005755, AC004783, |
| | | | | | AC004006, AP000694, AC002476, |
| | | | | | AL034417, AP000689, AF038458, |
| | | | | | AP000311, AF045555, Z94721, AL022333, |
| | | | | | AC005064, AP000038, AP000106, |
| | | | | | AC006211, AC007066, Z79997, |
| | | | | | AC004659, AB003151, Z84492, Z84486, |
| | | | | | U95739, AL135744, AC005220, |
| | | | | | AC004821, AL008582, AC005303, |
| | | | | | AP000211, AP000133, Z81364, AC006116, |
| | | | | | AC005512, AL050348, AC006274, |
| | | | | | U22376, AC003682, AL109802, |
| | | | | | AL133355, AC002544, AC006953, |
| | | | | | AC006968, U78027, AL031281, M27835, |
| | | | | | Z93241, AP000048, and AA887783. |
| HEMBT61 | 303 | 939957 | 1-449 | 15-463 | N86549, AW369713, and AB002301. |
| HRODZ70 | 304 | 1088554 | 1-927 | 15-941 | AA167766, AA167655, AA292911, |
| | | | | | H97685, AA635138, Z41812, AA507096, |
| | | | | | R40592, T17069, and AB007941. |
| HHERQ79 | 305 | 1184003 | 1-689 | 15-703 | AW340333, AW407893, AI806295, |
| | | | | | AW268810, AA827664, AA829237, |
| | | | | | AA909185, AA919008, AA604425, |
| | | | | | AI539428, AA011359, D63485, AB016590, |
| | | | | | and AB016589. |
| HCECM90 | 306 | 1031741 | 1-1379 | 15-1393 | AA463356, AA453500, AA322899, |
| | | | | | AA340682, H24259, AA603868, |
| | | | | | AA330182, R19782, and AB023227. |
| HWHGW72 | 307 | 1199614 | 1-1625 | 15-1639 | AA961509, AF190823, AF109388, |
| | | | | | AF190822, AF109387, AF190825, |
| | | | | | AF053328, AF053327, AF190824, U14414, |
| | | | | | AF053329, Y10473, Y10475, Y10474, |
| | | | | | AF020759, AF064549, AF190826, |
| | | | | | AF020756, and Y09910. |
| HPCRV84 | 308 | 1219890 | 1-863 | 15-877 | AA307070, D79997, L76158, and X95351. |
| HNSAA28 | 309 | 946988 | 1-1544 | 15-1558 | AA713959, AI564093, AA768779, |
| | | | | | AA825697, AA808021, AA808149, |
| | | | | | AI401490, AW181992, AW444640, |
| | | | | | AI018159, AF146277, and AF077003. |
| HLWAR77 | 310 | 947484 | 1-1275 | 15-1289 | AA449919, AA449920, and AF119815. |
| HTTJW49 | 311 | 1127477 | 1-1486 | 15-1500 | AW268880, AA199865, AW444872, |
| | | | | | AI769428, AI061340, AA707168, |
| | | | | | AI970984, AW236544, AI884812, |
| | | | | | AI479954, AI356088, AI701720, |
| | | | | | AA722812, AI989992, AA410516, |
| | | | | | AI765045, AI267987, AI298592, |
| | | | | | AA005114, AI865503, AW389168, |
| | | | | | AA360112, AI633370, AI498423, T55265, |
| | | | | | AA878382, AF118838, Y17571, |
| | | | | | AF164632, AC002450, AF164529, |
| | | | | | AF164526, AF164530, AF164528, |
| | | | | | AF164527, AC004458, AC002540, and |
| | | | | | AF164525. |
| HWAFS18 | 312 | 1155193 | 1-1873 | 15-1887 | AW009940, AI394293, AI082857, |
| | | | | | AW207417, AA227673, N99896, |
| | | | | | AA227560, AA491391, AA361942, |
| | | | | | AI000839, W25237, AA491389, and |
| | | | | | AF156884. |
| HFCBA44 | 313 | 1082762 | 1-769 | 15-783 | R85476, AW293022, AA339398, D80166, |
| | | | | | D80193, D81030, D59502, C14389, |
| | | | | | D80195, C15076, D80164, D59619, |
| | | | | | D80210, D80240, D80045, D80022, |
| | | | | | D59467, D59275, D80219, D80227, |
| | | | | | D80212, D80269, D58283, D59859, |
| | | | | | D80391, C14331, D59787, D51423, |
| | | | | | D51799, D80253, D80038, D80043, |
| | | | | | D80196, D81026, D50979, D80366, |
| | | | | | D80188, D59927, AA305409, D57483, |
| | | | | | D80378, D59889, D50995, D80024, |
| | | | | | D59610, D80133, D51060, C14014, |
| | | | | | AA305578, C14429, AW178893, D80248, |
| | | | | | D80522, D80241, AA514188, D51022, |
| | | | | | T03269, AW360811, AW177440, D80302, |
| | | | | | D80251, C75259, AA514186, D80439, |
| | | | | | AW377671, AW375405, AW179328, |
| | | | | | D80268, D80247, AW378532, AW352158, |
| | | | | | AW366296, AW360844, AW360817, |
| | | | | | AW375406, AW378534, AW179332, |
| | | | | | AW377672, AW179023, AW178905, |
| | | | | | AW178775, AW178762, D59373, D80134, |
| | | | | | AW369651, AW377676, D80157, |
| | | | | | AW177501, AW177511, C05695, D51250, |
| | | | | | D51103, AW352171, AW352170, D59695, |
| | | | | | AW178906, AW177731, AW178907, |
| | | | | | AW378528, AW179019, AW179024, |
| | | | | | D80132, D51759, D52291, AW176467, |
| | | | | | D80949, AW360841, AW177505, D80168, |
| | | | | | AW179020, C06015, D80064, AW178909, |
| | | | | | AW177456, AW179329, AW178980, |
| | | | | | AW177733, AW178908, AW178754, |
| | | | | | AW179018, C14298, AW352117, |
| | | | | | AW378540, D59653, D58253, C14227, |
| | | | | | D59503, AW179004, AI905856, |
| | | | | | AW179012, AI910186, AW178914, |
| | | | | | AW378525, AW352163, C14407, T48593, |
| | | | | | AI525923, D80258, AW360834, |
| | | | | | AW178983, C03092, AW179009, D45260, |
| | | | | | AW178774, AW178911, AW378543, |
| | | | | | AW177722, AW177728, AW352120, |
| | | | | | D58246, D59627, AA809122, H67854, |
| | | | | | H67866, AW178781, AI525917, D59317, |
| | | | | | T03116, D58101, C14077, T11417, |
| | | | | | AW367950, D51097, F13647, AW178986, |
| | | | | | AI525925, AW177723, AI535686, D81111, |
| | | | | | AI525920, D80014, D59551, C14973, |
| | | | | | AI525227, C14344, AW378533, AI557774, |
| | | | | | D51221, AA514184, D59474, D60010, |
| | | | | | D51213, D60214, AI525242, AI525235, |
| | | | | | AW177734, C14957, C14046, T03048, |
| | | | | | AI525912, AI525215, AI525222, D45273, |
| | | | | | AI525237, AA285331, AW378542, |
| | | | | | AI557751, AW378539, C13958, C16955, |
| | | | | | AI525928, C05763, Z33452, T02974, |
| | | | | | Z21582, AW360855, T02868, D51053, |
| | | | | | A84916, AJ132110, A62300, A62298, |
| | | | | | AR018138, AB028859, AR008278, |
| | | | | | AF058696, AR060385, X67155, Y17188, |
| | | | | | D26022, A25909, A82595, A67220, |
| | | | | | D89785, A78862, D34614, AB002449, |
| | | | | | Y12724, D88547, A45456, A94995, |
| | | | | | I82448, X82626, I50126, I50132, I50128, |
| | | | | | I50133, AR025207, AR008443, AR016808, |
| | | | | | AR016514, AR060138, I14842, AR066488, |
| | | | | | A26615, AR052274, Y09669, A43192, |
| | | | | | A43190, AR038669, AR066487, A30438, |
| | | | | | AB012117, AR054175, Y17187, D50010, |
| | | | | | A63261, AR008408, X64588, AR008277, |
| | | | | | AR008281, A85396, AR066482, A44171, |
| | | | | | I18367, AR062872, A70867, A85477, |
| | | | | | I19525, A86792, AR016691, AR016690, |
| | | | | | U46128, X93549, I79511, A64136, |
| | | | | | A68321, D88507, I50121, I50125, D13509, |
| | | | | | AR060133, X68127, AF123263, |
| | | | | | AR032065, and AW512144. |
| HVADT77 | 314 | 1180374 | 1-236 | 15-250 | AI217375, AI554767, AI948424, |
| | | | | | AI693185, AL134259, and AC006356. |
| HUFCN91 | 315 | 1189013 | 1-2534 | 15-2548 | AW401749, AW451778, AW450685, |
| | | | | | AW268855, AW152133, AI983406, |
| | | | | | AI656119, AI961994, AW448985, |
| | | | | | AI831678, AW403024, AW296492, |
| | | | | | AA195250, H09181, AI433189, AA258743, |
| | | | | | AA258380, AA866028, AI982819, |
| | | | | | AI919443, H09127, C01544, AA262275, |
| | | | | | and Z85996. |
| HAGBX32 | 316 | 951351 | 1-624 | 15-638 | W29095, H04905, H11833, AF100346, and |
| | | | | | AC004125. |
| HWMIB81 | 317 | 1092933 | 1-1604 | 15-1618 | AW380440, AW299858, AW391525, |
| | | | | | H78769, H78659, H53674, AA628987, |
| | | | | | AA447173, AW204470, AA343468, |
| | | | | | AA480342, AA114131, and AF155118. |
| HCEMU86 | 318 | 1156430 | 1-2145 | 15-2159 | W28902, AI694781, AA780441, W26632, |
| | | | | | AA861408, AI598157, R87939, AI360413, |
| | | | | | AA206559, H06785, AA496386, H14668, |
| | | | | | AA443069, AA437394, AW007070, |
| | | | | | AA351204, AI499867, AI982847, H14395, |
| | | | | | AW007079, T08889, AI933154, |
| | | | | | AA082863, AA085216, F07213, T33930, |
| | | | | | AA324000, AI366734, AI683546, R35601, |
| | | | | | T08328, R85233, AA325921, H09089, |
| | | | | | F07449, AA931914, T09198, AA297096, |
| | | | | | T07392, H14346, R40510, F02224, |
| | | | | | R13080, AA975823, R24819, H09438, |
| | | | | | H06678, F05981, F09630, F11982, |
| | | | | | AA551277, T83837, T30652, H21015, |
| | | | | | T65199, F08411, F08469, T33716, F13035, |
| | | | | | T08309, D54295, R58912, T05132, |
| | | | | | R51804, AI567931, F10628, T33189, |
| | | | | | T03545, H06677, R41862, Z19847, F04626, |
| | | | | | AI468068, AI803000, AA987266, R16332, |
| | | | | | AA365773, AI275574, AI092574, T65130, |
| | | | | | AI254357, AW183676, AA496337, |
| | | | | | R38256, H06605, AB018279, S47919, |
| | | | | | L05435, L01788, and A75140. |
| HRDAF83 | 319 | 1153911 | 1-1211 | 15-1225 | AI825217, AA316377, AW302711, |
| | | | | | AI144081, AA488067, AI587537, |
| | | | | | AI253519, AI953573, AW339743, |
| | | | | | AW302753, AA828046, AA292719, |
| | | | | | F35011, R70326, AA601230, T96582, |
| | | | | | AI053560, AW301906, AI133727, |
| | | | | | AI973207, AA205743, AW292981, |
| | | | | | H80463, AW085744, AA297496, |
| | | | | | AA502223, AA730601, H73438, |
| | | | | | AW438539, AA262086, AW301854, |
| | | | | | AA654849, AA491864, AA640495, |
| | | | | | AA363225, AI435248, AL041325, R21949, |
| | | | | | AA904231, AI696343, AA159046, |
| | | | | | AI745457, AI754567, AI754105, |
| | | | | | AI755214, AA669132, AA652267, |
| | | | | | AA984920, N25819, AA479930, AI734052, |
| | | | | | AI625693, AF109681, AF137378, |
| | | | | | AL135747, AL035251, AL049553, Z99128, |
| | | | | | AC002431, AC003046, AP000704, |
| | | | | | AC005993, AL020993, AC005844, |
| | | | | | Z95113, L44140, AC004068, AF002223, |
| | | | | | AP000500, AC004910, AL133163, Z84489, |
| | | | | | AC003012, Y10196, AC003664, L40817, |
| | | | | | X92763, Z73359, AC004757, AL035458, |
| | | | | | AF051976, AC003044, AF196971, |
| | | | | | AL109758, AC007298, AC006559, |
| | | | | | AC000026, AL031985, AC004150, |
| | | | | | AC005668, AL022326, AC007707, |
| | | | | | AL049653, AC002059, AP000212, |
| | | | | | AP000134, Z83855, AL023285, AC005193, |
| | | | | | AP000030, AL035106, Z49250, AP000251, |
| | | | | | AC003007, AC004675, AC003084, |
| | | | | | AC007934, AC005083, Z83845, AP000402, |
| | | | | | L42103, AL049778, AL117592, AC005189, |
| | | | | | AC002457, AP000013, L48038, AL121577, |
| | | | | | AL049709, AC005608, AC005304, |
| | | | | | AL109865, Z23091, AF190465, AC005212, |
| | | | | | Z97053, AL023653, AL049538, Z93244, |
| | | | | | AL133245, AC006312, AC002470, |
| | | | | | AC010205, AC005632, AC005773, |
| | | | | | AC005409, AL109627, AF054589, |
| | | | | | AL034548, AL121655, AC002430, |
| | | | | | AC006145, AL139054, AL109977, |
| | | | | | AC007878, AC005871, AP000459, |
| | | | | | AL031602, AL078477, AL080243, |
| | | | | | AC007384, Z68756, AC006965, |
| | | | | | AC004966, AL031657, AL035089, |
| | | | | | AL035249, AF020503, AC009294, |
| | | | | | AL034429, AC001231, AC018633, |
| | | | | | AC005696, AL022721, AL031289, |
| | | | | | AC005730, AC005011, AP000155, |
| | | | | | AC004094, AC005949, AC005969, |
| | | | | | AC004673, AP000565, U95739, |
| | | | | | AL049733, AC005484, AC005015, |
| | | | | | AC002094, AL050307, AL049557, |
| | | | | | AC000003, AF087970, AC010170, |
| | | | | | AC005821, Z94801, AF088219, AC004629, |
| | | | | | AB001523, AC005393, AC004386, |
| | | | | | AC002300, U73168, AL132777, |
| | | | | | AC002418, AL022313, AL022333, |
| | | | | | AC007226, AC002407, AC006237, |
| | | | | | AC007510, Z98750, AP000355, AC010209, |
| | | | | | AP000511, Z95116, AC004953, AC007639, |
| | | | | | AC007388, AL022165, AC020663, |
| | | | | | AL022163, AL049694, AL109946, |
| | | | | | AC005138, Z84481, AL117340, |
| | | | | | AC003956, AC005105, AC005952, |
| | | | | | U73166, AB023048, and AL121652. |
| HUVGZ88 | 320 | 1204719 | 1-2072 | 15-2086 | AI302185, AI652375, AI418298, |
| | | | | | AI936871, AI394630, AW206793, |
| | | | | | AI025217, AI983297, AI025310, |
| | | | | | AW002416, AI559159, AA593826, |
| | | | | | AW140018, AW401787, AI017077, |
| | | | | | AW239548, D54154, T03397, H42947, |
| | | | | | D57560, AW192088, R23870, AA026054, |
| | | | | | AA503315, Z40806, AW375742, F07734, |
| | | | | | AI807678, C14980, AA297059, |
| | | | | | AW338394, AI073417, AW138409, |
| | | | | | AA088799, AI356604, C15480, AI825970, |
| | | | | | AI537006, AI168175, R46685, AW078709, |
| | | | | | AA364780, AI343378, R46686, |
| | | | | | AW137324, AI015047, AA974700, |
| | | | | | H42881, AA325059, AI831833, H22172, |
| | | | | | T30407, AA897415, Z44281, F03562, |
| | | | | | R45025, F03423, F07299, R25015, |
| | | | | | AA382960, T32685, AW163027, |
| | | | | | AI815476, AA471062, T82311, AI911100, |
| | | | | | AW157059, R08769, AA047793, |
| | | | | | AA382959, and AW373232. |
| HSCKS55 | 321 | 1197921 | 1-2278 | 15-2292 | AW183030, AA535809, AI885834, |
| | | | | | AI831611, AA534906, T15603, AI364740, |
| | | | | | H29399, N27334, AI689402, H17545, |
| | | | | | AA353936, AA903747, R81708, D31451, |
| | | | | | R33400, AI707698, N75704, AI735097, |
| | | | | | R31870, AI608711, AI357830, R87560, |
| | | | | | AA954380, AI904965, AI289077, Z78378, |
| | | | | | AL046356, AL045891, AL041862, |
| | | | | | AI432666, AI434223, AL047675, |
| | | | | | AW172723, AL119748, AW151138, |
| | | | | | AL042787, AI366900, AI815232, |
| | | | | | AI805769, AI433157, AW151136, |
| | | | | | AI539771, AL042551, AI537677, |
| | | | | | AI494201, AI866786, AI500659, |
| | | | | | AI801325, AI500523, AI436429, |
| | | | | | AI582932, AI284517, AI923989, |
| | | | | | AI500706, AI445237, AI491776, |
| | | | | | AI521560, AI889189, AI500662, |
| | | | | | AI284509, AI860003, AI889168, |
| | | | | | AI866573, AI633493, AI434256, |
| | | | | | AI888661, AI284513, AI888118, |
| | | | | | AI889147, AI371228, AI440252, |
| | | | | | AI610557, AI887499, AI433976, |
| | | | | | AI554821, AL045163, AI440263, |
| | | | | | AL042488, AI432656, AL045500, |
| | | | | | AI866465, AA483831, AL047092, |
| | | | | | AI890907, AW172745, AL040207, |
| | | | | | AI866510, AI872423, AI923046, |
| | | | | | AL045620, AW191003, AI859991, |
| | | | | | AL047163, AI275175, AI934147, |
| | | | | | AL039276, AL047422, AL079977, |
| | | | | | AL042745, AL043089, AI371251, |
| | | | | | AI499463, AI610362, AL046990, |
| | | | | | AI440239, AI628850, AI620284, |
| | | | | | AW197139, AI537273, AI371265, |
| | | | | | AI436456, AI433968, AL046926, |
| | | | | | AI963846, AI567940, AI817244, |
| | | | | | AI612913, AI285826, AI863014, |
| | | | | | AI521594, AI499512, AI889133, |
| | | | | | AI866469, AI537515, AI610429, |
| | | | | | AI539632, AI889148, AW118237, |
| | | | | | AI539847, AI828583, AL042538, |
| | | | | | AI872300, AI354998, AI567935, |
| | | | | | AI805762, AL042365, AL135012, N80094, |
| | | | | | AI400725, AI582483, AI434242, |
| | | | | | AI608936, AI866608, AL042572, |
| | | | | | AI251205, AI800138, AI610402, |
| | | | | | AI242736, AI857724, AI866820, |
| | | | | | AI627880, AI274759, AI866741, |
| | | | | | AL042440, AL042557, AI538850, |
| | | | | | AI623682, AI818578, AI696378, |
| | | | | | AI866457, AI499381, AW082113, |
| | | | | | AI636268, AI049851, AI343091, |
| | | | | | AI567993, AL135025, F27438, AL042628, |
| | | | | | AW087938, AI654276, AI269862, |
| | | | | | AL048323, AW168485, AI431909, |
| | | | | | AL041772, AL048375, AI364788, |
| | | | | | AI922577, AI886022, AI538878, |
| | | | | | AI689175, AI445165, AW082594, |
| | | | | | AI919107, AW149227, AI873644, |
| | | | | | AI687065, AL047037, AI250663, |
| | | | | | AI824557, AI560023, AI812015, |
| | | | | | AW083804, AL043321, AL038445, |
| | | | | | AI697243, AL040243, AI916419, |
| | | | | | AI499986, AI590423, AA715307, |
| | | | | | AL036214, AI801561, AI355779, |
| | | | | | AI307210, AI823670, AL042377, |
| | | | | | AI343059, AL121270, AI538885, |
| | | | | | AI612885, AA420758, AI280670, |
| | | | | | AI349933, AI432644, AI097410, |
| | | | | | AL048312, AW078680, AI521596, |
| | | | | | AL048496, AI282326, AI439995, |
| | | | | | AW023590, AI888953, AW088899, |
| | | | | | AL042744, AA911767, AI919345, |
| | | | | | AI829327, AI349598, AL048377, |
| | | | | | AI619716, AI648567, AW269097, |
| | | | | | AI345347, AI686073, AI824375, |
| | | | | | AI334930, AI950664, AL118781, |
| | | | | | AI345608, AL038565, AI554218, |
| | | | | | AA427700, AI866002, AI471361, |
| | | | | | AW079159, AL122049, I48978, AL133565, |
| | | | | | AL133077, AL137550, A08916, |
| | | | | | AL133049, AL050277, AL117432, I89947, |
| | | | | | A08913, A08910, A08909, I89931, E15569, |
| | | | | | AL096744, I49625, AF125949, I48979, |
| | | | | | AL133093, AF162270, X70685, AL117585, |
| | | | | | AL122098, AL050108, AL133104, |
| | | | | | AL050116, L30117, AL137527, AF079765, |
| | | | | | E03348, AL110196, AF113013, AF090896, |
| | | | | | AL137459, AR059958, AF017152, |
| | | | | | A08912, S61953, AL122110, AR038854, |
| | | | | | AF113689, AL050024, Y11587, AL133080, |
| | | | | | AL122050, AR000496, U39656, M30514, |
| | | | | | AL117440, X93495, E07361, AF090943, |
| | | | | | AL122101, U80742, AL080137, |
| | | | | | AL117583, AF111112, AL137521, |
| | | | | | AF026816, Y16645, AL133072, I33392, |
| | | | | | Z72491, AL050172, AJ242859, AL049464, |
| | | | | | AL080127, U96683, AL137273, |
| | | | | | AL133606, AJ012755, AL080060, |
| | | | | | AL137523, AF153205, AL133557, X65873, |
| | | | | | E02221, AF003737, AL049466, AC002467, |
| | | | | | AL137526, AL049300, AL080159, |
| | | | | | AL133640, AL137271, Y14314, |
| | | | | | AL133016, AF146568, AL133113, |
| | | | | | AL122121, AL137476, AL122123, S68736, |
| | | | | | X72889, AF113694, AL049430, AL080074, |
| | | | | | AL049314, S78214, AF113676, AL050146, |
| | | | | | AL122118, U35846, U42766, AB019565, |
| | | | | | AF113699, I42402, AR011880, AF158248, |
| | | | | | AF104032, AF119337, A93016, AF091084, |
| | | | | | A65341, AF118070, A93350, AL110221, |
| | | | | | AL110225, AL122093, AL117435, |
| | | | | | U72620, AF078844, I26207, AR038969, |
| | | | | | AF113690, AF113019, AL137556, |
| | | | | | AF090934, AF118064, AF067728, E04233, |
| | | | | | AL049382, AF111851, Z82022, AF183393, |
| | | | | | AL137538, AL117460, Z37987, Y09972, |
| | | | | | U78525, AF090901, AL050393, X63574, |
| | | | | | AL137463, AF061943, U00763, AF113677, |
| | | | | | L19437, I09360, A90832, X87582, E05822, |
| | | | | | Y11254, U67958, E02349, AL133098, |
| | | | | | X84990, AL133075, AF090900, AL117457, |
| | | | | | A45787, L31396, AL133568, AL133014, |
| | | | | | AL050138, AL133560, L31397, AF106862, |
| | | | | | A58524, A58523, AL133067, AF118094, |
| | | | | | E08631, X98834, AF097996, AL137557, |
| | | | | | AJ000937, AL137648, E07108, AF090903, |
| | | | | | A12297, Y07905, U91329, AF057300, |
| | | | | | AF057299, X96540, I03321, AL049452, |
| | | | | | AJ238278, AF177401, AL080124, X82434, |
| | | | | | AF017437, A77033, A77035, AF087943, |
| | | | | | AL137560, U58996, AF111849, AF026124, |
| | | | | | AF113691, AL050149, AF125948, |
| | | | | | AL137533, I00734, AF185576, A03736, |
| | | | | | AF008439, AL110280, AF067790, |
| | | | | | AL049283, AL137478, AF079763, A07647, |
| | | | | | E00617, E00717, E00778, U68387, |
| | | | | | AL137480, E08263, E08264, AL117394, |
| | | | | | AL080086, X62580, AF081197, AL049938, |
| | | | | | AF132676, AL133081, AF061836, |
| | | | | | AJ006417, AL137292, AF081195, |
| | | | | | AF100931, AF210052, AL133053, X92070, |
| | | | | | AF061795, AF151685, X83508, AL137283, |
| | | | | | AF051325, AL137300, X53587, E06743, |
| | | | | | AL137294, AF061573, AF032666, I68732, |
| | | | | | and AL122111. |
| HOEET48 | 322 | 963290 | 1-1466 | 15-1480 | AI797684, AW239200, AA456267, |
| | | | | | AI478733, AI751749, AI990902, |
| | | | | | AA427646, AI379565, AI970534, W95460, |
| | | | | | AA788855, AA405402, AW068453, |
| | | | | | AW294114, AI751750, AA594137, |
| | | | | | AA947297, AW177719, AI057073, |
| | | | | | AA427487, AI341112, AA232452, |
| | | | | | AA041304, AW068711, H73236, |
| | | | | | AA041328, W95567, AW167569, |
| | | | | | AA853047, AI652166, W02069, H74164, |
| | | | | | R34003, AI341381, AW176526, |
| | | | | | AA580289, D30965, D31176, AA367502, |
| | | | | | and AR035969. |
| HBODE51 | 323 | 1193149 | 1-2774 | 15-2788 | AW411466, AW137475, AA922772, |
| | | | | | AA974304, AW204679, H05447, |
| | | | | | AI357778, AL044000, AL138265, |
| | | | | | AI038990, AW131249, D63198, |
| | | | | | AL120269, AI951863, AI732911, |
| | | | | | AI471543, AA601355, AL048969, |
| | | | | | AW102811, AA722372, AW248523, |
| | | | | | N66012, AW055226, F28204, AI457389, |
| | | | | | AA837677, AI952885, N49425, |
| | | | | | AW188427, AI863046, AW080062, |
| | | | | | AW070703, AA618412, AL079869, |
| | | | | | AL137984, AW167374, AL046746, |
| | | | | | AI791227, AL135698, AA610271, |
| | | | | | AA631507, AA604395, AA593752, |
| | | | | | AA706495, AL119123, N80210, |
| | | | | | AW204532, AW085751, AL046457, |
| | | | | | AA603421, AL042539, AA130901, |
| | | | | | AI313166, AA223932, AW008089, |
| | | | | | AA515250, AI859742, AL038705, |
| | | | | | AA634991, AI821044, AA577719, |
| | | | | | AI028148, AI569982, AI583978, |
| | | | | | AA744826, AA121815, AA679794, |
| | | | | | Y16610, AC004491, AF134726, |
| | | | | | AC005529, AC005015, AL022316, |
| | | | | | AC005081, AC009247, AC004383, |
| | | | | | AC002310, AC004967, AC005694, |
| | | | | | AC006312, AC007225, AF111169, |
| | | | | | U47924, AP000553, AC005484, |
| | | | | | AC004821, AC005531, AC005011, |
| | | | | | AL109984, AC004638, AL009181, |
| | | | | | AC006211, AC004851, AL096791, |
| | | | | | AP000688, AC004678, AC006285, |
| | | | | | AL031311, AC004263, AC007216, |
| | | | | | AC002316, AC006120, AC005837, |
| | | | | | AC005037, AC004019, AB023049, |
| | | | | | AC000025, AC007055, AL031681, |
| | | | | | AF001548, AL049795, AC002300, |
| | | | | | AC004814, AL031005, AL031848, |
| | | | | | AL024498, AL139054, AL034549, |
| | | | | | AC005225, AL109628, AC003101, |
| | | | | | AL135744, AC003070, AC006071, |
| | | | | | AP000557, AL133448, AC007686, |
| | | | | | AC007193, AC002301, AL035249, |
| | | | | | U91326, AC006538, AC007227, |
| | | | | | AF030876, AF030453, AC004812, |
| | | | | | AC007666, AF080517, AC006111, |
| | | | | | AC005527, AF080518, AP000512, |
| | | | | | AC004765, AC005972, AF196971, |
| | | | | | AL121603, AC007993, AL096701, |
| | | | | | AC016025, AC005088, AC005488, |
| | | | | | AC005480, AC005180, AL035683, |
| | | | | | AL049569, AL121653, AF196969, |
| | | | | | AC005620, AC007371, AC005089, |
| | | | | | AF053356, Z95114, AF001549, Z98941, |
| | | | | | AC007226, AC006064, AC004707, |
| | | | | | AC005049, AC003982, AL022476, |
| | | | | | AC007057, AL035659, AC000353, |
| | | | | | AC020663, AC002365, AL031602, |
| | | | | | AL033527, AL049776, AC002126, |
| | | | | | AC016830, AF196779, AC000026, Z93241, |
| | | | | | AF031078, AC005846, AF045555, |
| | | | | | AC005500, AP000350, AC006160, |
| | | | | | AC007731, AC004150, AC005755, |
| | | | | | AC009516, AL050318, AC005736, |
| | | | | | AL031670, AC007688, AL133355, |
| | | | | | AP000117, AC004887, AC004953, |
| | | | | | AC004832, AC007707, AC006088, |
| | | | | | AL021155, AC005899, AC006441, |
| | | | | | AC005071, AL049780, AC008040, |
| | | | | | AP000555, Z99128, AC000159, AL035684, |
| | | | | | AC002059, AC005921, AL022315, |
| | | | | | AC007536, AL020997, AL034420, |
| | | | | | U95742, AC004895, AL033392, |
| | | | | | AL034379, AC002400, AC006511, |
| | | | | | Z85996, AL109839, AL080242, AC005821, |
| | | | | | Z85987, AL022165, AL049830, AL008718, |
| | | | | | AC004217, AL035413, AP000503, |
| | | | | | AC005839, AC005516, Z97054, U62317, |
| | | | | | AC002425, AC005971, AC007917, |
| | | | | | AC006241, AC005746, AC006449, |
| | | | | | AP000356, AL021154, AC002470, |
| | | | | | AC002477, Z95115, AL049843, AL031667, |
| | | | | | U78027, AC004386, AC005520, |
| | | | | | AL031276, AC005519, U80017, |
| | | | | | AL117258, AL031295, AL031283, |
| | | | | | AC005004, AC004167, AC007308, |
| | | | | | U96629, AC004883, AC005914, |
| | | | | | AL022323, AC006013, AC005778, |
| | | | | | AC005696, AL022163, Z94044, |
| | | | | | AC007676, AF111168, AC000052, |
| | | | | | AF088219, AL031577, AC006057, |
| | | | | | AC004675, AC003029, Z84466, |
| | | | | | AC005328, U95740, AC002350, |
| | | | | | AC007842, AL031427, AL031733, |
| | | | | | AL021453, AL109759, AL035086, |
| | | | | | AC002544, AC006581, AC002288, |
| | | | | | AC005800, AL022328, Z82190, |
| | | | | | AC003043, AP000692, AL132987, |
| | | | | | AL049759, AF196972, AC006121, |
| | | | | | AC004882, AL133245, AC005231, |
| | | | | | AP000045, AL049761, AC004922, |
| | | | | | AL023807, Y14768, AL034429, |
| | | | | | AL022238, AL031255, AC000003, and |
| | | | | | W26963. |
| HHFCK09 | 324 | 965304 | 1-2789 | 15-2803 | AI218626, AI076006, AW162820, |
| | | | | | AI797880, AI922744, AI872391, |
| | | | | | AI559566, AL045117, AW161046, |
| | | | | | AW162613, AI565503, AW183962, |
| | | | | | AI857802, AA460810, AI884907, |
| | | | | | AI371131, AW248493, AI081779, |
| | | | | | AA460372, AA679085, N27884, |
| | | | | | AA581796, AA074070, AA971563, |
| | | | | | AI292006, AI922373, W76538, N93245, |
| | | | | | AI609183, AW172513, AI904299, |
| | | | | | AI682939, AA075764, AI885613, |
| | | | | | AA747871, AA449042, AA928020, |
| | | | | | AW401847, AA449757, AW268637, |
| | | | | | AW073851, AW304978, AI683858, |
| | | | | | AA568598, W74167, AI367698, |
| | | | | | AW191998, N62781, AW016535, |
| | | | | | AI902503, AA347639, AA297591, |
| | | | | | AA379280, AA568887, AA649970, |
| | | | | | AW264577, AI221886, H20460, |
| | | | | | AW387087, AW000860, AI275195, |
| | | | | | AA341002, T32918, AW162711, W25103, |
| | | | | | AI699657, R42681, AW243790, |
| | | | | | AA768740, T78554, AI279653, AI560482, |
| | | | | | AI696251, AI951374, Z45830, AA147203, |
| | | | | | AI499410, R43259, AI350354, AA732831, |
| | | | | | AW079129, AA375228, F08622, |
| | | | | | AI475009, R56337, AA379846, R17163, |
| | | | | | AW380349, AA783050, AW247402, |
| | | | | | N47545, R35508, R51077, AI474934, |
| | | | | | N79729, D61534, Z41466, AI678630, |
| | | | | | AA339343, AW367003, AA160401, |
| | | | | | Z41592, AW079321, N47546, AI252528, |
| | | | | | R58857, T16943, H55297, AL022238, |
| | | | | | AL137499, and AJ236700. |
| HCOOZ11 | 325 | 1110364 | 1-1321 | 15-1335 | AI218626, AI076006, AI797880, |
| | | | | | AI872391, AI922744, AA449042, |
| | | | | | AI559566, AW162613, AI565503, |
| | | | | | AI857802, AW248493, AI922373, |
| | | | | | AI292006, AA679085, AI904299, |
| | | | | | AA074070, W76538, AI682939, |
| | | | | | AA928020, AI609183, AW172513, |
| | | | | | N79729, AA747871, AI885613, AA449757, |
| | | | | | AW268637, AW183962, AW304978, |
| | | | | | AA568598, AI683858, AA379280, |
| | | | | | AI371131, AI884907, N62781, H20460, |
| | | | | | AI367698, N93245, AW073851, |
| | | | | | AW191998, AA581796, AA568887, |
| | | | | | AW016535, T78554, AI081779, AI221886, |
| | | | | | AW264577, AA649970, AI350354, |
| | | | | | AI275195, AI902503, AW000860, |
| | | | | | AW162711, AI699657, AA460372, |
| | | | | | AA379846, AA147203, AI951374, |
| | | | | | AI560482, AW243790, R42681, |
| | | | | | AA375228, AI499410, AI279653, |
| | | | | | AA732831, AI475009, N47545, AI696251, |
| | | | | | R43259, D61534, AA783050, AW079129, |
| | | | | | AI474934, R51077, AA160401, Z41466, |
| | | | | | W74167, AI678630, Z41592, AW079321, |
| | | | | | N47546, AL022238, and AL137499. |
| HDPPO35 | 326 | 1119032 | 1-1889 | 15-1903 | AI640500, AW439548, AI823872, |
| | | | | | AW297416, AA831672, AI815031, |
| | | | | | AA994323, AA741162, AA471280, |
| | | | | | AW339548, AI223999, AW235171, |
| | | | | | AI635436, AA035703, AA747998, |
| | | | | | AI371399, N67227, AA361754, AI536057, |
| | | | | | AA063573, AI357169, R33401, C01451, |
| | | | | | R33402, AA825399, AF165138, and |
| | | | | | AF130247. |
| HLWDZ53 | 327 | 1157542 | 1-2001 | 15-2015 | AA772242, AI309977, AI268079, |
| | | | | | AW152237, AI923556, AI968056, |
| | | | | | AA394106, AI985775, AI124863, T66217, |
| | | | | | AA700659, AA398135, AA927679, |
| | | | | | W68401, AW105606, AA989587, Y08708, |
| | | | | | AA559050, W68288, H11047, R23506, |
| | | | | | AI277174, F09831, H08254, R37378, |
| | | | | | AA339671, H11135, Y08709, H08154, |
| | | | | | H46511, R50952, H47050, F12201, |
| | | | | | R13468, AA320227, W31952, Y08714, |
| | | | | | R44639, R35282, H58759, H11255, |
| | | | | | T66150, W31329, AI910241, AA772192, |
| | | | | | AA662681, N84315, Y08707, T08656, |
| | | | | | AP000546, and AC002038. |
| HEOPL36 | 328 | 1197910 | 1-2122 | 15-2136 | AI061632, AW316850, AW367730, |
| | | | | | AA814516, AW367737, AI754746, |
| | | | | | AA777525, AW367804, AI097103, |
| | | | | | AW367782, AW367735, AW367773, |
| | | | | | N30303, AA847688, AW404639, N31888, |
| | | | | | AA779663, AW367809, AW367777, |
| | | | | | AW367785, AI923024, AA953814, |
| | | | | | AW367237, AI305265, AI624406, |
| | | | | | AA582843, N20267, AI827125, AI093328, |
| | | | | | AA911743, AI292227, AI684334, |
| | | | | | AI554543, AA290888, AW367806, |
| | | | | | AA503789, AW367741, H29119, |
| | | | | | AW338358, AW342022, R55898, |
| | | | | | AI401634, W79584, N45284, H25738, |
| | | | | | AA626619, AI024861, N31823, N42550, |
| | | | | | N33984, H17043, H41983, H99343, |
| | | | | | AI002168, AI979180, AI311586, N78814, |
| | | | | | AA564287, AA351508, AA968656, |
| | | | | | W20290, N31566, R75948, AI372938, |
| | | | | | AI277345, Z44878, AW367805, H29018, |
| | | | | | H60714, H17044, H71114, AI567783, |
| | | | | | H53271, AA599764, R60811, AI673673, |
| | | | | | T35639, AA158814, AI129803, H60713, |
| | | | | | H25974, AI423976, R61308, T30051, |
| | | | | | AA582155, AI174537, AI186537, |
| | | | | | AA705042, M85360, W79783, N29173, |
| | | | | | AA161097, R00089, N26452, Z17839, |
| | | | | | F01057, T34112, N54731, AI471185, |
| | | | | | AI023664, AW130265, W31954, H41935, |
| | | | | | T33806, R59766, AA826327, AI244584, |
| | | | | | AI202016, AI077600, N90670, AW009848, |
| | | | | | AA987544, N24540, AI432312, R09698, |
| | | | | | AA777544, R76786, AW081089, T31022, |
| | | | | | AW089365, AI468541, Z40650, AI217229, |
| | | | | | AI371184, T77157, Z28806, AA069041, |
| | | | | | AA505841, N42027, N42580, AI220752, |
| | | | | | AA346958, AI497869, AA160430, T32679, |
| | | | | | R09699, R55813, AI400851, AA298583, |
| | | | | | AI919072, T33966, AA159592, |
| | | | | | AW196132, AA743892, AI689177, |
| | | | | | W31331, T34006, AA911196, AW371882, |
| | | | | | AA301187, AW367265, AI217099, |
| | | | | | AA856916, AA879055, N29277, AI285514, |
| | | | | | H89138, AI819663, AA830044, AI687568, |
| | | | | | AW411043, AI583578, N49165, |
| | | | | | AW020381, AW151132, AW080076, |
| | | | | | AI954721, AI610426, AW198112, |
| | | | | | AI306705, AI306613, AI656270, |
| | | | | | AI628875, AI811373, AA737649, |
| | | | | | AI612885, AW189196, AA838230, |
| | | | | | AI274527, T66952, AI421662, AI249946, |
| | | | | | AL039011, AI470717, AI624529, |
| | | | | | AI318603, AW059828, AW303152, |
| | | | | | AI380329, AI225000, AI345778, |
| | | | | | AL037626, AI702527, AI627714, |
| | | | | | AI796743, AI056328, AI473652, |
| | | | | | AI280561, AW090550, AL045983, |
| | | | | | AI491904, AI799273, AI886355, |
| | | | | | AI933992, AI114703, AI678446, |
| | | | | | AW409775, AI479292, AI648699, |
| | | | | | AI250282, AI868204, AW022907, F37409, |
| | | | | | AI590043, AI500061, AW188388, |
| | | | | | AI553926, AI524654, AA579232, |
| | | | | | AI401697, AW080157, AW083484, |
| | | | | | AI815232, F26535, AA420722, AI471909, |
| | | | | | AA514684, AI370623, AI538885, |
| | | | | | AA761557, AW150762, AI540382, |
| | | | | | AW021189, AI682968, U69181, |
| | | | | | AL036980, AI860027, AW166870, |
| | | | | | AI452857, AW149849, AI628325, |
| | | | | | AI537187, AA746607, AI349957, |
| | | | | | AI804505, AF128536, AL049758, |
| | | | | | AF128535, AF139495, AF139493, |
| | | | | | AF139494, AF139492, AR030257, |
| | | | | | AL133624, AL133047, AF185614, U70981, |
| | | | | | AL137271, AL137555, U72621, |
| | | | | | AL049276, AR060156, AL133014, |
| | | | | | AJ010277, U57352, Y14634, I48978, |
| | | | | | AL080234, A07647, AF036941, AF115392, |
| | | | | | AR029580, L13297, AL122050, AL110222, |
| | | | | | AF102578, AF124728, AL137298, A58524, |
| | | | | | A58523, AF090943, AF038847, AF210052, |
| | | | | | AL050116, AF115410, AF113013, |
| | | | | | AF030165, AF111851, E12580, X53587, |
| | | | | | A07588, AJ238278, S61953, AF091084, |
| | | | | | AF120268, U42031, AF090886, AL110225, |
| | | | | | E02221, I89947, AF167995, S36676, |
| | | | | | AF097996, AL117457, I66342, AL137548, |
| | | | | | A08913, AF159148, AF044221, AL110221, |
| | | | | | AF015958, AR068466, I89931, AF090934, |
| | | | | | Y16645, AF118094, AL110224, A08910, |
| | | | | | AF081195, I49625, AR016469, A08909, |
| | | | | | AR012379, U02475, S77771, AL137665, |
| | | | | | AR050959, A18777, AR020905, |
| | | | | | AL049464, U89906, Y13350, U95114, |
| | | | | | AF125948, S68736, AL133010, AJ012755, |
| | | | | | AL133665, A70386, AF161699, U77594, |
| | | | | | U87620, AL080140, AL117394, X59414, |
| | | | | | AF043642, AF032666, I68732, AL137550, |
| | | | | | AF035161, AL137539, AF013214, A65340, |
| | | | | | AJ000937, AF118090, A93914, S82852, |
| | | | | | AF106657, AF061573, AF019298, X83508, |
| | | | | | X72889, AF113691, I00734, AF113690, |
| | | | | | AB016226, AF119336, AF176651, E00617, |
| | | | | | E00717, E00778, AL133049, AR011880, |
| | | | | | S78214, AL137463, A26498, AF067790, |
| | | | | | U92992, X82434, AF100931, AF017437, |
| | | | | | E03671, E12579, AF200464, AF183393, |
| | | | | | X52128, A91160, AL137711, AF090903, |
| | | | | | AF118558, AL050149, L31396, AL136842, |
| | | | | | AL080147, U42766, L31397, AF124435, |
| | | | | | A91162, Z97214, AL110280, U72620, |
| | | | | | I48979, AF118070, A77033, A77035, |
| | | | | | X62580, AL117460, AL122093, |
| | | | | | AL049452, X98834, AF067728, Y11254, |
| | | | | | AL050277, X80340, E07108, AL137716, |
| | | | | | AL133560, AF078844, AF031903, |
| | | | | | AL137557, Y18680, U92068, AL137560, |
| | | | | | X70685, AL110296, AJ242859, M96857, |
| | | | | | AL137281, U80919, U91329, AF057300, |
| | | | | | U88966, L24896, AL122110, AL136884, |
| | | | | | AF205861, AL035458, AL080159, Z82022, |
| | | | | | U77351, AL133557, U00763, U80742, |
| | | | | | AJ012582, X93495, S69510, A08916, |
| | | | | | E12747, AL080124, AL096728, X66862, |
| | | | | | AF070632, AL137478, AL117587, |
| | | | | | AL049382, AL133640, AL137459, |
| | | | | | AF111849, AL137554, AB007812, |
| | | | | | A93350, I09499, U73682, AL137658, |
| | | | | | AF146568, AL117435, AL133031, A03736, |
| | | | | | AF026816, A32826, A30330, A32827, |
| | | | | | A30331, and U01145. |
| HMCFS02 | 329 | 1152252 | 1-1432 | 15-1446 | AL119990, AI459232, AI990971, |
| | | | | | AW274849, AA524531, AI703399, |
| | | | | | AW295852, AI086621, AI582316, |
| | | | | | AI887899, AI198620, AW444954, |
| | | | | | AI201159, AI761662, AA769116, |
| | | | | | AI678189, AI769819, AA908833, |
| | | | | | AW001104, AI797112, AW339272, |
| | | | | | AW151222, AI025272, AI638810, |
| | | | | | AA291544, AW083242, AA781447, |
| | | | | | AW003604, AW015232, N30310, |
| | | | | | AA831760, AI624665, AI027612, |
| | | | | | AW276610, AW168171, AA442455, |
| | | | | | AW170708, AI807572, AW080508, |
| | | | | | T62956, AI052790, AA827853, AA737447, |
| | | | | | AI969056, AA465529, H03505, R78862, |
| | | | | | AW378235, AA465115, AW205495, |
| | | | | | AA515398, AI972735, AA805386, |
| | | | | | AA436647, H03615, N56642, AI825714, |
| | | | | | AA293351, AI473377, AA404571, |
| | | | | | AI349471, AW292091, T63206, |
| | | | | | AA252574, R79349, Z38283, AA399447, |
| | | | | | AI582475, AI870404, AA252529, |
| | | | | | AA708728, AI670981, AA429843, C06324, |
| | | | | | C06235, T88738, AA429867, AA748807, |
| | | | | | T10782, AW392315, AI650622, and |
| | | | | | D20600. |
| HDPSR15 | 330 | 1194752 | 1-1682 | 15-1696 | AW195239, AW149418, AA461376, |
| | | | | | AW005579, AI392913, AI378013, |
| | | | | | AA461199, AI860240, AA779830, |
| | | | | | AI436586, AA147800, AA576717, |
| | | | | | AI276889, AW337924, AI264931, |
| | | | | | AI203549, AA459985, AW104319, |
| | | | | | AA460078, AI377235, AI925811, |
| | | | | | AI094031, AI291778, AI612894, |
| | | | | | AA147758, AA639492, AA767986, |
| | | | | | AA037273, R61563, AA463275, H59980, |
| | | | | | AA832298, AA417605, AA628790, |
| | | | | | AW166255, AA768536, R35919, |
| | | | | | AI289261, AA157070, AA731955, |
| | | | | | AI273576, AA508841, AI360737, N47107, |
| | | | | | AI301339, AI682196, AA463188, H59937, |
| | | | | | AI208175, D20738, AI391726, W42645, |
| | | | | | R14353, AI271983, AI073411, N30324, |
| | | | | | N56657, T53535, H57854, AW001677, |
| | | | | | R35723, AI242094, AA969269, N50317, |
| | | | | | AI808646, AA514325, AI280324, |
| | | | | | AA360254, AI699261, AA551384, T77863, |
| | | | | | AA263061, AA906804, AA741518, |
| | | | | | T11446, AI091790, AA505982, AI208678, |
| | | | | | AA031793, AA214523, AA428834, |
| | | | | | T12550, T11445, AB026289, and |
| | | | | | AR044150. |
| HNTAV78 | 331 | 1217231 | 1-3733 | 15-3747 | AI417713, AW235714, AI537274, |
| | | | | | AL042544, AL119457, AL119511, |
| | | | | | AL119399, AL043152, AL042382, |
| | | | | | AL119324, AL134524, AL079794, |
| | | | | | AI431323, AL043168, AI889189, |
| | | | | | AI521560, AI433157, AI539771, |
| | | | | | AI537677, AI500659, AI801325, |
| | | | | | AI500523, AI284517, AI500706, |
| | | | | | AI445237, AI491776, AW151138, |
| | | | | | AI500662, AI284509, AI633493, |
| | | | | | AI538885, AI866573, AI434256, |
| | | | | | AI888661, AI284513, AI888118, |
| | | | | | AI582932, AL045500, AI537273, |
| | | | | | AI815232, AI433976, AI567935, |
| | | | | | AI554821, AI889376, AI371251, |
| | | | | | AI889168, AI620284, AI275175, |
| | | | | | AW151136, AL042551, AI866510, |
| | | | | | AL042365, AI923989, AI440252, |
| | | | | | AL110306, AI499463, AI929108, |
| | | | | | AI610362, AI440239, AI927233, |
| | | | | | AI436456, AI432656, AI567940, |
| | | | | | AI817244, AL042787, AL119863, |
| | | | | | AI612913, AL041862, AI285826, |
| | | | | | AI863014, AI499512, AI889133, |
| | | | | | AI610402, AI434223, AI610429, |
| | | | | | AI963846, AL042538, AI432666, |
| | | | | | AI805769, AI889148, AI628850, |
| | | | | | AI633125, AW161579, AI866608, |
| | | | | | AI859991, AI567993, AI860003, |
| | | | | | AI364788, AL036980, AI922901, |
| | | | | | AI491710, AL042866, AL134259, |
| | | | | | AW022682, AI889147, AL047422, |
| | | | | | AW083804, AL045163, AI866457, |
| | | | | | AA572758, AI446373, AI654276, |
| | | | | | AI866786, AI612885, AA420758, |
| | | | | | AI874166, AI494201, AW089272, |
| | | | | | AW021717, AI805762, AL048496, |
| | | | | | AI866469, AL037454, AI872423, |
| | | | | | AW301300, AI349598, AW172723, |
| | | | | | AI702073, AI440263, AW269097, |
| | | | | | AI434242, AW051258, AW191003, |
| | | | | | AI436429, AI371228, AI872300, |
| | | | | | AI610557, AI242736, AI887499, |
| | | | | | AI539632, AI539847, AL045620, |
| | | | | | AL042627, AL042557, AI433037, |
| | | | | | AI500714, AI567961, AW081255, |
| | | | | | AL079741, AI538850, AI955441, |
| | | | | | AI345010, AW129106, AL042745, |
| | | | | | AI312428, AL036705, AL039086, |
| | | | | | AW020693, AI289791, AI890907, |
| | | | | | AI521594, AW087445, AA613907, |
| | | | | | AI348897, AI635492, AI670009, |
| | | | | | AI673278, AW023072, AL119836, |
| | | | | | AI269862, AI637584, AL119828, |
| | | | | | AI432644, AI340603, AL036631, |
| | | | | | AI582926, AA635382, AA259207, |
| | | | | | AI567953, AI537515, AI318280, |
| | | | | | AI537191, AA420722, AW082113, |
| | | | | | AI499131, AL119791, AL040241, |
| | | | | | AI866465, AL119748, AI274759, |
| | | | | | AI916419, AL047387, AI811344, |
| | | | | | AL046926, AW268220, AL041573, |
| | | | | | AI431307, AW073865, AI049851, |
| | | | | | AI648567, AI690946, AL022726, |
| | | | | | AC006296, AL031295, AL030998, |
| | | | | | AC007392, AC005224, AL096709, |
| | | | | | AC005723, AC008394, AC010175, |
| | | | | | AC006115, AC004062, AL009029, |
| | | | | | AL031123, AC004808, and Z83840. |
| HFKDR14 | 332 | 1145842 | 1-1308 | 15-1322 | AI761729, AW104395, AW298361, |
| | | | | | AI073443, N40162, AW162515, AI827518, |
| | | | | | AW297353, R52045, AI342317, R71958, |
| | | | | | AF128625, AF021936, and AW517595. |
| HDPBI30 | 333 | 974711 | 1-2911 | 15-2925 | AA714520, N78665, W15172, AL134531, |
| | | | | | AA074818, AI251157, AI311635, |
| | | | | | AA079403, AW130754, AI935943, |
| | | | | | AF083955, AC005015, AL034423, |
| | | | | | AP000030, AC002992, AC004216, |
| | | | | | AC003013, U91321, AC003684, |
| | | | | | AC002528, AL117258, AL021155, |
| | | | | | AP000045, AF053356, AL033521, |
| | | | | | AC004598, U91326, AL035072, |
| | | | | | AD000091, U82668, AC012384, L44140, |
| | | | | | AF006752, AL034350, AC006039, |
| | | | | | AC005756, AC005072, AL034429, |
| | | | | | AC002352, AC005682, AC003663, |
| | | | | | AC005049, AC007298, AC005620, |
| | | | | | AC004887, AL117694, AC005911, |
| | | | | | AC007688, AC006014, AC004797, |
| | | | | | AL031186, AL031283, AC004963, L47234, |
| | | | | | Z84466, AC004125, AC005529, |
| | | | | | AL031293, AC006276, AL034400, |
| | | | | | AC004099, AC005089, AL049871, |
| | | | | | AC004893, AL080243, AC007021, |
| | | | | | AL049712, AC007993, AC006581, |
| | | | | | AC005837, AF139813, M13792, |
| | | | | | AC005086, AL096791, AJ251973, |
| | | | | | AC002301, AC006139, AC005488, |
| | | | | | L78810, AC006115, AC004966, |
| | | | | | AC006538, Z93244, AC004834, |
| | | | | | AL049570, AC004084, AP000113, |
| | | | | | AP000251, and AC005696. |
| HODFF88 | 334 | 1094875 | 1-1843 | 15-1857 | D80164, D59502, D80193, D80195, |
| | | | | | D59275, C15076, D80227, D58283, |
| | | | | | D80022, D80166, D81030, D59859, |
| | | | | | D51799, D59619, D80210, D80391, |
| | | | | | D80240, D59787, D51423, D80253, |
| | | | | | D80043, D80269, D50979, D80212, |
| | | | | | D80038, D80196, D80024, D80219, |
| | | | | | D80188, C14331, D59467, D57483, |
| | | | | | D59927, D80378, D80366, C14389, |
| | | | | | D59889, D50995, D80045, D59610, |
| | | | | | AA305409, C14429, D80241, D51060, |
| | | | | | T03269, C14014, AW178893, C75259, |
| | | | | | AA305578, D81026, D59695, D51022, |
| | | | | | AW179328, D81111, AW178775, D80134, |
| | | | | | AW378532, AW177440, D51250, |
| | | | | | AW352158, D80268, F13647, AA514188, |
| | | | | | AW369651, D80251, D80522, D51079, |
| | | | | | D80248, D80949, D58253, AW178762, |
| | | | | | D80168, D52291, C14227, AA514186, |
| | | | | | AI905856, AW177501, AW177511, |
| | | | | | D80133, Z21582, AW360811, C05695, |
| | | | | | C14298, AW352117, D80064, AW176467, |
| | | | | | AW375405, AW378540, C14407, |
| | | | | | AW377671, D51097, AW366296, D80302, |
| | | | | | AW360844, AW360817, AW375406, |
| | | | | | AW378534, AW179332, AW377672, |
| | | | | | AW179023, AW178905, D80132, |
| | | | | | AW360834, AA285331, D80439, |
| | | | | | AW352171, AW377676, AW178906, |
| | | | | | AW352170, AW177731, D80247, |
| | | | | | AW178907, AW179019, AW179024, |
| | | | | | D51103, AW177505, AW360841, |
| | | | | | AW179020, AW178909, AW177456, |
| | | | | | AW179329, AW178980, AW177733, |
| | | | | | AW378528, AW178908, AW178754, |
| | | | | | AW179018, AW179220, AI557751, |
| | | | | | AW179004, AW178914, AW378525, |
| | | | | | AW352174, T11417, D80157, AW177728, |
| | | | | | D59627, D51759, AW367967, AW178774, |
| | | | | | AW178911, AW378543, AW352163, |
| | | | | | D59503, D80258, D80014, C06015, |
| | | | | | AI557774, AW178983, AW352120, |
| | | | | | T03116, AW178781, T48593, D58246, |
| | | | | | C14077, D59653, AW177723, D58101, |
| | | | | | D45260, AI525923, AW178986, |
| | | | | | AW367950, C03092, AA809122, H67854, |
| | | | | | D59551, H67866, C14975, T02974, |
| | | | | | AW378533, AW378539, D51213, |
| | | | | | AW177734, AI535686, D59317, D51221, |
| | | | | | AI525917, C14973, AA514184, C14344, |
| | | | | | D45273, AI525925, AI525920, D59474, |
| | | | | | AI525227, D31458, C14046, AI525242, |
| | | | | | AI525235, T03048, AI525912, AW378542, |
| | | | | | AI525215, AI525237, C16955, C05763, |
| | | | | | Z33452, AI535850, AI535961, A84916, |
| | | | | | AJ132110, A62300, A62298, AR018138, |
| | | | | | X67155, Y17188, D26022, A25909, |
| | | | | | A67220, D89785, A78862, D34614, |
| | | | | | D88547, AF058696, X82626, AR008278, |
| | | | | | AB028859, AR025207, I82448, Y12724, |
| | | | | | A82595, AB012117, AR060385, |
| | | | | | AB002449, A85396, AR066482, A44171, |
| | | | | | A85477, A94995, X68127, I19525, |
| | | | | | A86792, X93549, AR008443, AR016808, |
| | | | | | U87250, I50133, I50126, I50132, I50128, |
| | | | | | AR066488, AR016514, AR060138, |
| | | | | | A45456, A26615, AR052274, I14842, |
| | | | | | Y09669, A43192, A43190, AR038669, |
| | | | | | AR066487, A30438, AF135125, D88507, |
| | | | | | AR066490, D50010, AR054175, I18367, |
| | | | | | Y17187, A63261, AR008277, AR008281, |
| | | | | | AR008408, AR062872, A70867, |
| | | | | | AB033111, AR016691, AR016690, |
| | | | | | U46128, D13509, AR060133, I79511, |
| | | | | | AR064240, A64136, A68321, U87247, |
| | | | | | AB023656, U79457, AF123263, X93535, |
| | | | | | and AR008382. |

[0089] TABLE 4

| Code | Description | Tissue | Organ | Cell Line | Disease | Vector |
|---|---|---|---|---|---|---|
| AR022 | a_Heart | a_Heart | | | | |
| AR023 | a_Liver | a_Liver | | | | |
| AR024 | a_mammary gland | a_mammary gland | | | | |
| AR025 | a_Prostate | a_Prostate | | | | |
| AR026 | a_small intestine | a_small intestine | | | | |
| AR027 | a_Stomach | a_Stomach | | | | |
| AR028 | Blood B cells | Blood B cells | | | | |
| AR029 | Blood B cells activated | Blood B cells | | | | |
| | | activated | | | | |
| AR030 | Blood B cells resting | Blood B cells | | | | |
| | | resting | | | | |
| AR031 | Blood T cells activated | Blood T cells | | | | |
| | | activated | | | | |
| AR032 | Blood T cells resting | Blood T cells resting | | | | |
| AR033 | brain | brain | | | | |
| AR034 | breast | breast | | | | |
| AR035 | breast cancer | breast cancer | | | | |
| AR036 | Cell Line CAOV3 | Cell Line CAOV3 | | | | |
| AR037 | cell line PA-1 | cell line PA-1 | | | | |
| AR038 | cell line transformed | cell line transformed | | | | |
| AR039 | colon | colon | | | | |
| AR040 | colon (9808co65R) | colon (9808co65R) | | | | |
| AR041 | colon (9809co15) | colon (9809co15) | | | | |
| AR042 | colon cancer | colon cancer | | | | |
| AR043 | colon cancer (9808co64R) | colon cancer | | | | |
| | | (9808co64R) | | | | |
| AR044 | colon cancer 9809co14 | colon cancer | | | | |
| | | 9809co14 | | | | |
| AR045 | corn clone 5 | corn clone 5 | | | | |
| AR046 | corn clone 6 | corn clone 6 | | | | |
| AR047 | corn clone 2 | corn clone 2 | | | | |
| AR048 | corn clone 3 | corn clone 3 | | | | |
| AR049 | Corn Clone 4 | Corn Clone 4 | | | | |
| AR050 | Donor II B Cells 24 hrs | Donor II B Cells | | | | |
| | | 24 hrs | | | | |
| AR051 | Donor II B Cells 72 hrs | Donor II B Cells | | | | |
| | | 72 hrs | | | | |
| AR052 | Donor II B-Cells 24 hrs. | Donor II B-Cells 24 | | | | |
| | | hrs. | | | | |
| AR053 | Donor II B-Cells 72 hrs | Donor II B-Cells | | | | |
| | | 72 hrs | | | | |
| AR054 | Donor II Resting B Cells | Donor II Resting B | | | | |
| | | Cells | | | | |
| AR055 | Heart | Heart | | | | |
| AR056 | Human Lung (clonetech) | Human Lung | | | | |
| | | (clonetech) | | | | |
| AR057 | Human Mammary | Human Mammary | | | | |
| | (clontech) | (clontech) | | | | |
| AR058 | Human Thymus | Human Thymus | | | | |
| | (clonetech) | (clonetech) | | | | |
| AR059 | Jurkat (unstimulated) | Jurkat | | | | |
| | | (unstimulated) | | | | |
| AR060 | Kidney | Kidney | | | | |
| AR061 | Liver | Liver | | | | |
| AR062 | Liver (Clontech) | Liver (Clontech) | | | | |
| AR063 | Lymphocytes chronic | Lymphocytes | | | | |
| | lymphocytic leukaemia | chronic lymphocytic | | | | |
| | | leukaemia | | | | |
| AR064 | Lymphocytes diffuse large | Lymphocytes | | | | |
| | B cell lymphoma | diffuse large B cell | | | | |
| | | lymphoma | | | | |
| AR065 | Lymphocytes follicular | Lymphocytes | | | | |
| | lymphoma | follicular lymphoma | | | | |
| AR066 | normal breast | normal breast | | | | |
| AR067 | Normal Ovarian | Normal Ovarian | | | | |
| | (4004901) | (4004901) | | | | |
| AR068 | Normal Ovary 9508G045 | Normal Ovary | | | | |
| | | 9508G045 | | | | |
| AR069 | Normal Ovary 9701G208 | Normal Ovary | | | | |
| | | 9701G208 | | | | |
| AR070 | Normal Ovary 9806G005 | Normal Ovary | | | | |
| | | 9806G005 | | | | |
| AR071 | Ovarian Cancer | Ovarian Cancer | | | | |
| AR072 | Ovarian Cancer | Ovarian Cancer | | | | |
| | (9702G001) | (9702G001) | | | | |
| AR073 | Ovarian Cancer | Ovarian Cancer | | | | |
| | (9707G029) | (9707G029) | | | | |
| AR074 | Ovarian Cancer | Ovarian Cancer | | | | |
| | (9804G011) | (9804G011) | | | | |
| AR075 | Ovarian Cancer | Ovarian Cancer | | | | |
| | (9806G019) | (9806G019) | | | | |
| AR076 | Ovarian Cancer | Ovarian Cancer | | | | |
| | (9807G017) | (9807G017) | | | | |
| AR077 | Ovarian Cancer | Ovarian Cancer | | | | |
| | (9809G001) | (9809G001) | | | | |
| AR078 | ovarian cancer 15799 | ovarian cancer | | | | |
| | | 15799 | | | | |
| AR079 | Ovarian Cancer | Ovarian Cancer | | | | |
| | 17717AID | 17717AID | | | | |
| AR080 | Ovarian Cancer | Ovarian Cancer | | | | |
| | 4004664B1 | 4004664B1 | | | | |
| AR081 | Ovarian Cancer | Ovarian Cancer | | | | |
| | 4005315A1 | 4005315A1 | | | | |
| AR082 | ovarian cancer 94127303 | ovarian cancer | | | | |
| | | 94127303 | | | | |
| AR083 | Ovarian Cancer 96069304 | Ovarian Cancer | | | | |
| | | 96069304 | | | | |
| AR084 | Ovarian Cancer 9707G029 | Ovarian Cancer | | | | |
| | | 9707G029 | | | | |
| AR085 | Ovarian Cancer 9807G045 | Ovarian Cancer | | | | |
| | | 9807G045 | | | | |
| AR086 | ovarian cancer 9809G001 | ovarian cancer | | | | |
| | | 9809G001 | | | | |
| AR087 | Ovarian Cancer | Ovarian Cancer | | | | |
| | 9905C032RC | 9905C032RC | | | | |
| AR088 | Ovarian cancer 9907 C00 | Ovarian cancer 9907 | | | | |
| | 3rd | C00 3rd | | | | |
| AR089 | Prostate | Prostate | | | | |
| AR090 | Prostate (clonetech) | Prostate (clonetech) | | | | |
| AR091 | prostate cancer | prostate cancer | | | | |
| AR092 | prostate cancer #15176 | prostate cancer | | | | |
| | | #15176 | | | | |
| AR093 | prostate cancer #15509 | prostate cancer | | | | |
| | | #15509 | | | | |
| AR094 | prostate cancer #15673 | prostate cancer | | | | |
| | | #15673 | | | | |
| AR095 | Small Intestine (Clontech) | Small Intestine | | | | |
| | | (Clontech) | | | | |
| AR096 | Spleen | Spleen | | | | |
| AR097 | Thymus T cells activated | Thymus T cells | | | | |
| | | activated | | | | |
| AR098 | Thymus T cells resting | Thymus T cells | | | | |
| | | resting | | | | |
| AR099 | Tonsil | Tonsil | | | | |
| AR100 | Tonsil geminal center | Tonsil geminal | | | | |
| | centroblast | center centroblast | | | | |
| AR101 | Tonsil germinal center B | Tonsil germinal | | | | |
| | cell | center B cell | | | | |
| AR102 | Tonsil lymph node | Tonsil lymph node | | | | |
| AR103 | Tonsil memory B cell | Tonsil memory B | | | | |
| | | cell | | | | |
| AR104 | Whole Brain | Whole Brain | | | | |
| AR105 | Xenograft ES-2 | Xenograft ES-2 | | | | |
| AR106 | Xenograft SW626 | Xenograft SW626 | | | | |
| H0004 | Human Adult Spleen | Human Adult | Spleen | | | Uni-ZAP XR |
| | | Spleen | | | | |
| H0008 | Whole 6 Week Old | | | | | Uni-ZAP XR |
| | Embryo | | | | | |
| H0009 | Human Fetal Brain | | | | | Uni-ZAP XR |
| H0011 | Human Fetal Kidney | Human Fetal Kidney | Kidney | | | Uni-ZAP XR |
| H0012 | Human Fetal Kidney | Human Fetal Kidney | Kidney | | | Uni-ZAP XR |
| H0013 | Human 8 Week Whole | Human 8 Week Old | Embryo | | | Uni-ZAP XR |
| | Embryo | Embryo | | | | |
| H0014 | Human Gall Bladder | Human Gall Bladder | Gall Bladder | | | Uni-ZAP XR |
| H0015 | Human Gall Bladder, | Human Gall Bladder | Gall Bladder | | | Uni-ZAP XR |
| | fraction II | | | | | |
| H0022 | Jurkat Cells | Jurkat T-Cell Line | | | | Lambda |
| | | | | | | ZAP II |
| H0023 | Human Fetal Lung | | | | | Uni-ZAP XR |
| H0024 | Human Fetal Lung III | Human Fetal Lung | Lung | | | Uni-ZAP XR |
| H0025 | Human Adult Lymph | Human Adult | Lymph Node | | | Lambda |
| | Node | Lymph Node | | | | ZAP II |
| H0027 | Human Ovarian Cancer | | | | disease | Uni-ZAP XR |
| H0028 | Human Old Ovary | Human Old Ovary | Ovary | | | pBluescript |
| H0029 | Human Pancreas | Human Pancreas | Pancreas | | | Uni-ZAP XR |
| H0030 | Human Placenta | | | | | Uni-ZAP XR |
| H0031 | Human Placenta | Human Placenta | Placenta | | | Uni-ZAP XR |
| H0032 | Human Prostate | Human Prostate | Prostate | | | Uni-ZAP XR |
| H0036 | Human Adult Small | Human Adult Small | Small Int. | | | Uni-ZAP XR |
| | Intestine | Intestine | | | | |
| H0037 | Human Adult Small | Human Adult Small | Small Int. | | | pBluescript |
| | Intestine | Intestine | | | | |
| H0038 | Human Testes | Human Testes | Testis | | | Uni-ZAP XR |
| H0039 | Human Pancreas Tumor | Human Pancreas | Pancreas | | disease | Uni-ZAP XR |
| | | Tumor | | | | |
| H0040 | Human Testes Tumor | Human Testes | Testis | | disease | Uni-ZAP XR |
| | | Tumor | | | | |
| H0041 | Human Fetal Bone | Human Fetal Bone | Bone | | | Uni-ZAP XR |
| H0042 | Human Adult Pulmonary | Human Adult | Lung | | | Uni-ZAP XR |
| | | Pulmonary | | | | |
| H0046 | Human Endometrial | Human Endometrial | Uterus | | disease | Uni-ZAP XR |
| | Tumor | Tumor | | | | |
| H0048 | Human Pineal Gland | Human Pineal Gland | | | | Uni-ZAP XR |
| H0050 | Human Fetal Heart | Human Fetal Heart | Heart | | | Uni-ZAP XR |
| H0051 | Human Hippocampus | Human | Brain | | | Uni-ZAP XR |
| | | Hippocampus | | | | |
| H0052 | Human Cerebellum | Human Cerebellum | Brain | | | Uni-ZAP XR |
| H0056 | Human Umbilical Vein, | Human Umbilical | Umbilical | | | Uni-ZAP XR |
| | Endo. remake | Vein Endothelial | vein | | | |
| | | Cells | | | | |
| H0057 | Human Fetal Spleen | | | | | Uni-ZAP XR |
| H0059 | Human Uterine Cancer | Human Uterine | Uterus | | disease | Lambda |
| | | Cancer | | | | ZAP II |
| H0063 | Human Thymus | Human Thymus | Thymus | | | Uni-ZAP XR |
| H0068 | Human Skin Tumor | Human Skin Tumor | Skin | | disease | Uni-ZAP XR |
| H0069 | Human Activated T-Cells | Activated T-Cells | Blood | Cell Line | | Uni-ZAP XR |
| H0071 | Human Infant Adrenal | Human Infant | Adrenal | | | Uni-ZAP XR |
| | Gland | Adrenal Gland | gland | | | |
| H0075 | Human Activated T-Cells | Activated T-Cells | Blood | Cell Line | | Uni-ZAP XR |
| | (II) | | | | | |
| H0081 | Human Fetal Epithelium | Human Fetal Skin | Skin | | | Uni-ZAP XR |
| | (Skin) | | | | | |
| H0083 | HUMAN JURKAT | Jurkat Cells | | | | Uni-ZAP XR |
| | MEMBRANE BOUND | | | | | |
| | POLYSOMES | | | | | |
| H0085 | Human Colon | Human Colon | | | | Lambda |
| | | | | | | ZAP II |
| H0086 | Human epithelioid | Epithelioid | Sk Muscle | | disease | Uni-ZAP XR |
| | sarcoma | Sarcoma, muscle | | | | |
| H0087 | Human Thymus | Human Thymus | | | | pBluescript |
| H0090 | Human T-Cell Lymphoma | T-Cell Lymphoma | T-Cell | | disease | Uni-ZAP XR |
| H0098 | Human Adult Liver, | Human Adult Liver | Liver | | | Uni-ZAP XR |
| | subtracted | | | | | |
| H0100 | Human Whole Six Week | Human Whole Six | Embryo | | | Uni-ZAP XR |
| | Old Embryo | Week Old | | | | |
| | | Embryo | | | | |
| H0101 | Human 7 Weeks Old | Human Whole 7 | Embryo | | | Lambda |
| | Embryo, subtracted | Week Old Embryo | | | | ZAP II |
| H0102 | Human Whole 6 Week | Human Whole Six | Embryo | | | pBluescript |
| | Old Embryo (II), subt | Week Old Embryo | | | | |
| H0105 | Human Fetal Heart, | Human Fetal Heart | Heart | | | pBluescript |
| | subtracted | | | | | |
| H0108 | Human Adult Lymph | Human Adult | Lymph Node | | | Uni-ZAP XR |
| | Node, subtracted | Lymph Node | | | | |
| H0116 | Human Thymus Tumor, | Human Thymus | Thymus | | | pBluescript |
| | subtracted | Tumor | | | | |
| H0118 | Human Adult Kidney | Human Adult | Kidney | | | Uni-ZAP XR |
| | | Kidney | | | | |
| H0122 | Human Adult Skeletal | Human Skeletal | Sk Muscle | | | Uni-ZAP XR |
| | Muscle | Muscle | | | | |
| H0123 | Human Fetal Dura Mater | Human Fetal Dura | Brain | | | Uni-ZAP XR |
| | | Mater | | | | |
| H0124 | Human | Human | Sk Muscle | | disease | Uni-ZAP XR |
| | Rhabdomyosarcoma | Rhabdomyosarcoma | | | | |
| H0125 | Cem cells cyclohexamide | Cyclohexamide | Blood | Cell Line | | Uni-ZAP XR |
| | treated | Treated Cem, Jurkat, | | | | |
| | | Raji, and Supt | | | | |
| H0130 | LNCAP untreated | LNCAP Cell Line | Prostate | Cell Line | | Uni-ZAP XR |
| H0131 | LNCAP + o.3 nM R1881 | LNCAP Cell Line | Prostate | Cell Line | | Uni-ZAP XR |
| H0132 | LNCAP + 30 nM R1881 | LNCAP Cell Line | Prostate | Cell Line | | Uni-ZAP XR |
| H0134 | Raji Cells, cyclohexamide | Cyclohexamide | Blood | Cell Line | | Uni-ZAP XR |
| | treated | Treated Cem, Jurkat, | | | | |
| | | Raji, and Supt | | | | |
| H0135 | Human Synovial Sarcoma | Human Synovial | Synovium | | | Uni-ZAP XR |
| | | Sarcoma | | | | |
| H0136 | Supt Cells, cyclohexamide | Cyclohexamide | Blood | Cell Line | | Uni-ZAP XR |
| | treated | Treated Cem, Jurkat, | | | | |
| | | Raji, and Supt | | | | |
| H0141 | Activated T-Cells, 12 hrs. | Activated T-Cells | Blood | Cell Line | | Uni-ZAP XR |
| H0144 | Nine Week Old Early | 9 Wk Old Early | Embryo | | | Uni-ZAP XR |
| | Stage Human | Stage Human | | | | |
| H0149 | 7 Week Old Early Stage | Human Whole 7 | Embryo | | | Uni-ZAP XR |
| | Human, subtracted | Week Old Embryo | | | | |
| H0150 | Human Epididymus | Epididymis | Testis | | | Uni-ZAP XR |
| H0154 | Human Fibrosarcoma | Human Skin | Skin | | disease | Uni-ZAP XR |
| | | Fibrosarcoma | | | | |
| H0156 | Human Adrenal Gland | Human Adrenal | Adrenal | | disease | Uni-ZAP XR |
| | Tumor | Gland Tumor | Gland | | | |
| H0159 | Activated T-Cells, 8 hrs., | Activated T-Cells | Blood | Cell Line | | Uni-ZAP XR |
| | ligation 2 | | | | | |
| H0163 | Human Synovium | Human Synovium | Synovium | | | Uni-ZAP XR |
| H0165 | Human Prostate Cancer, | Human Prostate | Prostate | | disease | Uni-ZAP XR |
| | Stage B2 | Cancer, stage B2 | | | | |
| H0166 | Human Prostate Cancer, | Human Prostate | Prostate | | disease | Uni-ZAP XR |
| | Stage B2 fraction | Cancer, stage B2 | | | | |
| H0169 | Human Prostate Cancer, | Human Prostate | Prostate | | disease | Uni-ZAP XR |
| | Stage C fraction | Cancer, stage C | | | | |
| H0170 | 12 Week Old Early Stage | Twelve Week Old | Embryo | | | Uni-ZAP XR |
| | Human | Early Stage Human | | | | |
| H0171 | 12 Week Old Early Stage | Twelve Week Old | Embryo | | | Uni-ZAP XR |
| | Human, II | Early Stage Human | | | | |
| H0172 | Human Fetal Brain, | Human Fetal Brain | Brain | | | Lambda |
| | random primed | | | | | ZAP II |
| H0175 | H. Adult Spleen, ziplox | | | | | pSport1 |
| H0176 | CAMA1Ee Cell Line | CAMA1Ee Cell | Breast | Cell Line | | Uni-ZAP XR |
| | | Line | | | | |
| H0178 | Human Fetal Brain | Human Fetal Brain | Brain | | | Uni-ZAP XR |
| H0179 | Human Neutrophil | Human Neutrophil | Blood | Cell Line | | Uni-ZAP XR |
| H0181 | Human Primary Breast | Human Primary | Breast | | disease | Uni-ZAP XR |
| | Cancer | Breast Cancer | | | | |
| H0182 | Human Primary Breast | Human Primary | Breast | | disease | Uni-ZAP XR |
| | Cancer | Breast Cancer | | | | |
| H0187 | Resting T-Cell | T-Cells | Blood | Cell Line | | Lambda |
| | | | | | | ZAP II |
| H0188 | Human Normal Breast | Human Normal | Breast | | | Uni-ZAP XR |
| | | Breast | | | | |
| H0192 | Cem Cells, cyclohexamide | Cyclohexamide | Blood | Cell Line | | Uni-ZAP XR |
| | treated, subtra | Treated Cem, Jurkat, | | | | |
| | | Raji, and Supt | | | | |
| H0194 | Human Cerebellum, | Human Cerebellum | Brain | | | pBluescript |
| | subtracted | | | | | |
| H0196 | Human Cardiomyopathy, | Human | Heart | | | Uni-ZAP XR |
| | subtracted | Cardiomyopathy | | | | |
| H0201 | Human Hippocampus, | Human | Brain | | | pBluescript |
| | subtracted | Hippocampus | | | | |
| H0205 | Human Colon Cancer, | Human Colon | Colon | | | pBluescript |
| | differential | Cancer | | | | |
| H0208 | Early Stage Human Lung, | Human Fetal Lung | Lung | | | pBluescript |
| | subtracted | | | | | |
| H0212 | Human Prostate, | Human Prostate | Prostate | | | pBluescript |
| | subtracted | | | | | |
| H0213 | Human Pituitary, | Human Pituitary | | | | Uni-ZAP XR |
| | subtracted | | | | | |
| H0214 | Raji cells, cyclohexamide | Cyclohexamide | Blood | Cell Line | | pBluescript |
| | treated, subtracted | Treated Cem, Jurkat, | | | | |
| | | Raji, and Supt | | | | |
| H0222 | Activated T-Cells, 8 hrs, | Activated T-Cells | Blood | Cell Line | | Uni-ZAP XR |
| | subtracted | | | | | |
| H0229 | Early Stage Human Brain, | Early Stage Human | Brain | | | Lambda |
| | random primed | Brain | | | | ZAP II |
| H0230 | Human Cardiomyopathy, | Human | Heart | | disease | Uni-ZAP XR |
| | diff exp | Cardiomyopathy | | | | |
| H0231 | Human Colon, subtraction | Human Colon | | | | pBluescript |
| H0239 | Human Kidney Tumor | Human Kidney | Kidney | | disease | Uni-ZAP XR |
| | | Tumor | | | | |
| H0242 | Human Fetal Heart, | Human Fetal Heart | Heart | | | pBluescript |
| | Differential (Fetal- | | | | | |
| | Specific) | | | | | |
| H0244 | Human 8 Week Whole | Human 8 Week Old | Embryo | | | Uni-ZAP XR |
| | Embryo, subtracted | Embryo | | | | |
| H0250 | Human Activated | Human Monocytes | | | | Uni-ZAP XR |
| | Monocytes | | | | | |
| H0251 | Human Chondrosarcoma | Human | Cartilage | | disease | Uni-ZAP XR |
| | | Chondrosarcoma | | | | |
| H0252 | Human Osteosarcoma | Human | Bone | | disease | Uni-ZAP XR |
| | | Osteosarcoma | | | | |
| H0253 | Human adult testis, large | Human Adult Testis | Testis | | | Uni-ZAP XR |
| | inserts | | | | | |
| H0254 | Breast Lymph node cDNA | Breast Lymph Node | Lymph Node | | | Uni-ZAP XR |
| | library | | | | | |
| H0255 | breast lymph node CDNA | Breast Lymph Node | Lymph Node | | | Lambda |
| | library | | | | | ZAP II |
| H0261 | H. cerebellum, Enzyme | Human Cerebellum | Brain | | | Uni-ZAP XR |
| | subtracted | | | | | |
| H0263 | human colon cancer | Human Colon | Colon | | disease | Lambda |
| | | Cancer | | | | ZAP II |
| H0264 | human tonsils | Human Tonsil | Tonsil | | | Uni-ZAP XR |
| H0265 | Activated T-Cell | T-Cells | Blood | Cell Line | | Uni-ZAP XR |
| | (12hs)/Thiouridine | | | | | |
| | labelledEco | | | | | |
| H0266 | Human Microvascular | HMEC | Vein | Cell Line | | Lambda |
| | Endothelial Cells, fract. A | | | | | ZAP II |
| H0268 | Human Umbilical Vein | HUVE Cells | Umbilical | Cell Line | | Lambda |
| | Endothelial Cells, fract. A | | vein | | | ZAP II |
| H0269 | Human Umbilical Vein | HUVE Cells | Umbilical | Cell Line | | Lambda |
| | Endothelial Cells, fract. B | | vein | | | ZAP II |
| H0270 | HPAS (human pancreas, | Human Pancreas | Pancreas | | | Uni-ZAP XR |
| | subtracted) | | | | | |
| H0271 | Human Neutrophil, | Human Neutrophil - | Blood | Cell Line | | Uni-ZAP XR |
| | Activated | Activated | | | | |
| H0272 | HUMAN TONSILS, | Human Tonsil | Tonsil | | | Uni-ZAP XR |
| | FRACTION 2 | | | | | |
| H0274 | Human Adult Spleen, | Human Adult | Spleen | | | Uni-ZAP XR |
| | fractionII | Spleen | | | | |
| H0280 | K562 + PMA (36 hrs) | K562 Cell line | cell line | Cell Line | | ZAP Express |
| H0284 | Human OB MG63 control | Human | Bone | Cell Line | | Uni-ZAP XR |
| | fraction I | Osteoblastoma | | | | |
| | | MG63 cell line | | | | |
| H0286 | Human OB MG63 treated | Human | Bone | Cell Line | | Uni-ZAP XR |
| | (10 nM E2) fraction I | Osteoblastoma | | | | |
| | | MG63 cell line | | | | |
| H0288 | Human OB HOS control | Human | Bone | Cell Line | | Uni-ZAP XR |
| | fraction I | Osteoblastoma HOS | | | | |
| | | cell line | | | | |
| H0290 | Human OB HOS treated | Human | Bone | Cell Line | | Uni-ZAP XR |
| | (1 nM E2) fraction I | Osteoblastoma HOS | | | | |
| | | cell line | | | | |
| H0292 | Human OB HOS treated | Human | Bone | Cell Line | | Uni-ZAP XR |
| | (10 nM E2) fraction I | Osteoblastoma HOS | | | | |
| | | cell line | | | | |
| H0293 | WI 38 cells | | | | | Uni-ZAP XR |
| H0294 | Amniotic Cells - TNF | Amniotic Cells - | Placenta | Cell Line | | Uni-ZAP XR |
| | induced | TNF induced | | | | |
| H0295 | Amniotic Cells - Primary | Amniotic Cells - | Placenta | Cell Line | | Uni-ZAP XR |
| | Culture | Primary Culture | | | | |
| H0305 | CD34 positive cells (Cord | CD34 Positive Cells | Cord Blood | | | ZAP Express |
| | Blood) | | | | | |
| H0306 | CD34 depleted Buffy Coat | CD34 Depleted | Cord Blood | | | ZAP Express |
| | (Cord Blood) | Buffy Coat (Cord | | | | |
| | | Blood) | | | | |
| H0309 | Human Chronic Synovitis | Synovium, Chronic | Synovium | | disease | Uni-ZAP XR |
| | | Synovitis/ | | | | |
| | | Osteoarthritis | | | | |
| H0310 | human caudate nucleus | Brain | Brain | | | Uni-ZAP XR |
| H0316 | HUMAN STOMACH | Human Stomach | Stomach | | | Uni-ZAP XR |
| H0318 | HUMAN B CELL | Human B Cell | Lymph Node | | disease | Uni-ZAP XR |
| | LYMPHOMA | Lymphoma | | | | |
| H0320 | Human frontal cortex | Human Frontal | Brain | | | Uni-ZAP XR |
| | | Cortex | | | | |
| H0327 | human corpus colosum | Human Corpus | Brain | | | Uni-ZAP XR |
| | | Callosum | | | | |
| H0328 | human ovarian cancer | Ovarian Cancer | Ovary | | disease | Uni-ZAP XR |
| H0329 | Dermatofibrosarcoma | Dermatofibrosarcoma | Skin | | disease | Uni-ZAP XR |
| | Protuberance | Protuberans | | | | |
| H0331 | Hepatocellular Tumor | Hepatocellular | Liver | | disease | Lambda |
| | | Tumor | | | | ZAP II |
| H0333 | Hemangiopericytoma | Hemangiopericytoma | Blood vessel | | disease | Lambda |
| | | | | | | ZAP II |
| H0334 | Kidney cancer | Kidney Cancer | Kidney | | disease | Uni-ZAP XR |
| H0339 | Duodenum | Duodenum | | | | Uni-ZAP XR |
| H0340 | Corpus Callosum | Corpus Collosum- | | | | Uni-ZAP XR |
| | | 93052 | | | | |
| H0341 | Bone Marrow Cell Line | Bone Marrow Cell | Bone Marrow | Cell Line | | Uni-ZAP XR |
| | (RS4; 11) | Line RS4; 11 | | | | |
| H0343 | stomach cancer (human) | Stomach Cancer - | | | disease | Uni-ZAP XR |
| | | 5383A (human) | | | | |
| H0345 | SKIN | Skin - 4000868H | Skin | | | Uni-ZAP XR |
| H0349 | human adult liver cDNA | Human Adult Liver | Liver | | | pCMVSport |
| | library | | | | | 1 |
| H0351 | Glioblastoma | Glioblastoma | Brain | | disease | Uni-ZAP XR |
| H0352 | wilm″s tumor | Wilm″s Tumor | | | disease | Uni-ZAP XR |
| H0355 | Human Liver | Human Liver, | | | | pCMVSport |
| | | normal Adult | | | | 1 |
| H0359 | KMH2 cell line | KMH2 | | | | ZAP Express |
| H0361 | Human rejected kidney | Human Rejected | | | disease | pBluescript |
| | | Kidney | | | | |
| H0364 | Human Osteoclastoma, | Human | | | disease | pBluescript |
| | excised | Osteoclastoma | | | | |
| H0369 | H. Atrophic Endometrium | Atrophic | | | | Uni-ZAP XR |
| | | Endometrium and | | | | |
| | | myometrium | | | | |
| H0370 | H. Lymph node breast | Lymph node with | | | disease | Uni-ZAP XR |
| | Cancer | Met. Breast Cancer | | | | |
| H0373 | Human Heart | Human Adult Heart | Heart | | | pCMVSport |
| | | | | | | 1 |
| H0374 | Human Brain | Human Brain | | | | pCMVSport |
| | | | | | | 1 |
| H0375 | Human Lung | Human Lung | | | | pCMVSport |
| | | | | | | 1 |
| H0379 | Human Tongue, frac 1 | Human Tongue | | | | pSport1 |
| H0386 | Leukocyte and Lung; 4 | Human Leukocytes | Blood | Cell Line | | pCMVSport |
| | screens | | | | | 1 |
| H0390 | Human Amygdala | Human Amygdala | | | disease | pBluescript |
| | Depression, re-excision | Depression | | | | |
| H0391 | H. Meniingima, M6 | Human Meningima | brain | | | pSport1 |
| H0392 | H. Meningima, M1 | Human Meningima | brain | | | pSport1 |
| H0393 | Fetal Liver, subtraction II | Human Fetal Liver | Liver | | | pBluescript |
| H0394 | A-14 cell line | Redd-Sternberg cell | | | | ZAP Express |
| H0395 | A1-CELL LINE | Redd-Sternberg cell | | | | ZAP Express |
| H0396 | L1 Cell line | Redd-Sternberg cell | | | | ZAP Express |
| H0399 | Human Kidney Cortex, re- | Human Kidney | | | | Lambda |
| | rescue | Cortex | | | | ZAP II |
| H0402 | CD34 depleted Buffy Coat | CD34 Depleted | Cord Blood | | | ZAP Express |
| | (Cord Blood), re-excision | Buffy Coat (Cord | | | | |
| | | Blood) | | | | |
| H0403 | H. Umbilical Vein | HUVE Cells | Umbilical | Cell Line | | Uni-ZAP XR |
| | Endothelial Cells, IL4 | | vein | | | |
| | induced | | | | | |
| H0404 | H. Umbilical Vein | HUVE Cells | Umbilical | Cell Line | | Uni-ZAP XR |
| | endothelial cells, | | vein | | | |
| | uninduced | | | | | |
| H0409 | H. Striatum Depression, | Human Brain, | Brain | | | pBluescript |
| | subtracted | Striatum Depression | | | | |
| H0411 | H Female Bladder, Adult | Human Female | Bladder | | | pSport1 |
| | | Adult Bladder | | | | |
| H0412 | Human umbilical vein | HUVE Cells | Umbilical | Cell Line | | pSport1 |
| | endothelial cells, IL-4 | | vein | | | |
| | induced | | | | | |
| H0413 | Human Umbilical Vein | HUVE Cells | Umbilical | Cell Line | | pSport1 |
| | Endothelial Cells, | | vein | | | |
| | uninduced | | | | | |
| H0414 | Ovarian Tumor I, OV5232 | Ovarian Tumor, | Ovary | | disease | pSport1 |
| | | OV5232 | | | | |
| H0415 | H. Ovarian Tumor, II, | Ovarian Tumor, | Ovary | | disease | pCMVSport |
| | OV5232 | OV5232 | | | | 2.0 |
| H0416 | Human Neutrophils, | Human Neutrophil - | Blood | Cell Line | | pBluescript |
| | Activated, re-excision | Activated | | | | |
| H0421 | Human Bone Marrow, re- | Bone Marrow | | | | pBluescript |
| | excision | | | | | |
| H0422 | T-Cell PHA 16 hrs | T-Cells | Blood | Cell Line | | pSport1 |
| H0423 | T-Cell PHA 24 hrs | T-Cells | Blood | Cell Line | | pSport1 |
| H0424 | Human Pituitary, subt IX | Human Pituitary | | | | pBluescript |
| H0427 | Human Adipose | Human Adipose, left | | | | pSport1 |
| | | hiplipoma | | | | |
| H0428 | Human Ovary | Human Ovary | Ovary | | | pSport1 |
| | | Tumor | | | | |
| H0429 | K562 + PMA (36 hrs), re- | K562 Cell line | cell line | Cell Line | | ZAP Express |
| | excision | | | | | |
| H0431 | H. Kidney Medulla, re- | Kidney medulla | Kidney | | | pBluescript |
| | excision | | | | | |
| H0433 | Human Umbilical Vein | HUVE Cells | Umbilical | Cell Line | | pBluescript |
| | Endothelial cells, frac B, | | vein | | | |
| | re-excision | | | | | |
| H0434 | Human Brain, striatum, | Human Brain, | | | | pBluescript |
| | re-excision | Striatum | | | | |
| H0435 | Ovarian Tumor 10-3-95 | Ovarian Tumor, | Ovary | | | pCMVSport |
| | | OV350721 | | | | 2.0 |
| H0436 | Resting T-Cell Library, II | T-Cells | Blood | Cell Line | | pSport1 |
| H0437 | H Umbilical Vein | HUVE Cells | Umbilical | Cell Line | | Lambda |
| | Endothelial Cells, frac A, | | vein | | | ZAP II |
| | re-excision | | | | | |
| H0438 | H. Whole Brain #2, re- | Human Whole Brain | | | | ZAP Express |
| | excision | #2 | | | | |
| H0441 | H. Kidney Cortex, | Kidney cortex | Kidney | | | pBluescript |
| | subtracted | | | | | |
| H0444 | Spleen metastic melanoma | Spleen, Metastic | Spleen | | disease | pSport1 |
| | | malignant | | | | |
| | | melanoma | | | | |
| H0445 | Spleen, Chronic | Human Spleen, CLL | Spleen | | disease | pSport1 |
| | lymphocytic leukemia | | | | | |
| H0455 | H. Striatum Depression, | Human Brain, | Brain | | | pBluescript |
| | subt | Striatum Depression | | | | |
| H0456 | H Kidney Cortex, | Human Kidney | | | | pBluescript |
| | subtracted III | Cortex | | | | |
| H0457 | Human Eosinophils | Human Eosinophils | | | | pSport1 |
| H0459 | CD34 + cells, II, | CD34 positive cells | | | | pCMVSport |
| | FRACTION 2 | | | | | 2.0 |
| H0477 | Human Tonsil, Lib 3 | Human Tonsil | Tonsil | | | pSport1 |
| H0478 | Salivary Gland, Lib 2 | Human Salivary | Salivary | | | pSport1 |
| | | Gland | gland | | | |
| H0479 | Salivary Gland, Lib 3 | Human Salivary | Salivary | | | pSport1 |
| | | Gland | gland | | | |
| H0483 | Breast Cancer cell line, | Breast Cancer Cell | | | | pSport1 |
| | MDA 36 | line, MDA 36 | | | | |
| H0484 | Breast Cancer Cell line, | Breast Cancer Cell | | | | pSport1 |
| | angiogenic | line, Angiogenic, | | | | |
| | | 36T3 | | | | |
| H0485 | Hodgkin″s Lymphoma I | Hodgkin″s | | | disease | pCMVSport |
| | | Lymphoma I | | | | 2.0 |
| H0486 | Hodgkin″s Lymphoma II | Hodgkin″s | | | disease | pCMVSport |
| | | Lymphoma II | | | | 2.0 |
| H0487 | Human Tonsils, lib I | Human Tonsils | | | | pCMVSport |
| | | | | | | 2.0 |
| H0488 | Human Tonsils, Lib 2 | Human Tonsils | | | | pCMVSport |
| | | | | | | 2.0 |
| H0489 | Crohn″s Disease | Ileum | Intestine | | disease | pSport1 |
| H0494 | Keratinocyte | Keratinocyte | | | | pCMVSport |
| | | | | | | 2.0 |
| H0497 | HEL cell line | HEL cell line | | HEL | | pSport1 |
| | | | | 92.1.7 | | |
| H0505 | Human Astrocyte | Human Astrocyte | | | | pSport1 |
| H0506 | Ulcerative Colitis | Colon | Colon | | | pSport1 |
| H0509 | Liver, Hepatoma | Human Liver, | Liver | | disease | pCMVSport |
| | | Hepatoma, patient 8 | | | | 3.0 |
| H0510 | Human Liver, normal | Human Liver, | Liver | | | pCMVSport |
| | | normal, Patient #8 | | | | 3.0 |
| H0517 | Nasal polyps | Nasal polyps | | | | pCMVSport |
| | | | | | | 2.0 |
| H0518 | pBMC stimulated w/poly | pBMC stimulated | | | | pCMVSport |
| | I/C | with poly I/C | | | | 3.0 |
| H0519 | NTERA2, control | NTERA2, | | | | pCMVSport |
| | | Teratocarcinoma | | | | 3.0 |
| | | cell line | | | | |
| H0520 | NTERA2 + retinoic acid, | NTERA2, | | | | pSport1 |
| | 14 days | Teratocarcinoma | | | | |
| | | cell line | | | | |
| H0521 | Primary Dendritic Cells, | Primary Dendritic | | | | pCMVSport |
| | lib 1 | cells | | | | 3.0 |
| H0522 | Primary Dendritic | Primary Dendritic | | | | pCMVSport |
| | cells,frac 2 | cells | | | | 3.0 |
| H0528 | Poly[I]/Poly[C] Normal | Poly[I]/Poly[C] | | | | pCMVSport |
| | Lung Fibroblasts | Normal Lung | | | | 3.0 |
| | | Fibroblasts | | | | |
| H0529 | Myoloid Progenitor Cell | TF-1 Cell Line; | | | | pCMVSport |
| | Line | Myoloid progenitor | | | | 3.0 |
| | | cell line | | | | |
| H0530 | Human Dermal | Human Dermal | | | | pSport1 |
| | Endothelial | Endothelial Cells; | | | | |
| | Cells, untreated | untreated | | | | |
| H0538 | Merkel Cells | Merkel cells | Lymph node | | | pSport1 |
| H0539 | Pancreas Islet Cell Tumor | Pancreas Islet Cell | Pancreas | | disease | pSport1 |
| | | Tumour | | | | |
| H0540 | Skin, burned | Skin, leg burned | Skin | | | pSport1 |
| H0542 | T Cell helper I | Helper T cell | | | | pCMVSport |
| | | | | | | 3.0 |
| H0543 | T cell helper II | Helper T cell | | | | pCMVSport |
| | | | | | | 3.0 |
| H0544 | Human endometrial | Human endometrial | | | | pCMVSport |
| | stromal cells | stromal cells | | | | 3.0 |
| H0545 | Human endometrial | Human endometrial | | | | pCMVSport |
| | stromal cells-treated with | stromal cells-treated | | | | 3.0 |
| | progesterone | with proge | | | | |
| H0546 | Human endometrial | Human endometrial | | | | pCMVSport |
| | stromal cells-treated with | stromal cells-treated | | | | 3.0 |
| | estradiol | with estra | | | | |
| H0547 | NTER A2 teratocarcinoma | NTERA2, | | | | pSport1 |
| | cell line + retinoic acid (14 | Teratocarcinoma | | | | |
| | days) | cell line | | | | |
| H0549 | H. Epididiymus, caput & | Human | | | | Uni-ZAP XR |
| | corpus | Epididiyrnus, caput | | | | |
| | | and corpus | | | | |
| H0550 | H. Epididiymus, cauda | Human | | | | Uni-ZAP XR |
| | | Epididiymus, cauda | | | | |
| H0551 | Human Thymus Stromal | Human Thymus | | | | pCMVSport |
| | Cells | Stromal Cells | | | | 3.0 |
| H0553 | Human Placenta | Human Placenta | | | | pCMVSport |
| | | | | | | 3.0 |
| H0555 | Rejected Kidney, lib 4 | Human Rejected | Kidney | | disease | pCMVSport |
| | | Kidney | | | | 3.0 |
| H0556 | Activated T- | T-Cells | Blood | Cell Line | | Uni-ZAP XR |
| | cell(12 h)/Thiouridine-re- | | | | | |
| | excision | | | | | |
| H0559 | HL-60, PMA 4H, re- | HL-60 Cells, PMA | Blood | Cell Line | | Uni-ZAP XR |
| | excision | stimulated 4H | | | | |
| H0560 | KMH2 | KMH2 | | | | pCMVSport |
| | | | | | | 3.0 |
| H0561 | L428 | L428 | | | | pCMVSport |
| | | | | | | 3.0 |
| H0562 | Human Fetal Brain, | Human Fetal Brain | | | | pCMVSport |
| | normalized c5-11-26 | | | | | 2.0 |
| H0563 | Human Fetal Brain, | Human Fetal Brain | | | | pCMVSport |
| | normalized 50021F | | | | | 2.0 |
| H0564 | Human Fetal Brain, | Human Fetal Brain | | | | pCMVSport |
| | normalized C5001F | | | | | 2.0 |
| H0566 | Human Fetal | Human Fetal Brain | | | | pCMVSport |
| | Brain,normalized c50F | | | | | 2.0 |
| H0569 | Human Fetal Brain, | Human Fetal Brain | | | | pCMVSport |
| | normalized CO | | | | | 2.0 |
| H0570 | Human Fetal Brain, | Human Fetal Brain | | | | pCMVSport |
| | normalized C500H | | | | | 2.0 |
| H0571 | Human Fetal Brain, | Human Fetal Brain | | | | pCMVSport |
| | normalized C500HE | | | | | 2.0 |
| H0572 | Human Fetal Brain, | Human Fetal Brain | | | | pCMVSport |
| | normalized AC5002 | | | | | 2.0 |
| H0574 | Hepatocellular Tumor; re- | Hepatocellular | Liver | | disease | Lambda |
| | excision | Tumor | | | | ZAP II |
| H0575 | Human Adult | Human Adult | Lung | | | Uni-ZAP XR |
| | Pulmonary; re-excision | Pulmonary | | | | |
| H0576 | Resting T-Cell; re- | T-Cells | Blood | Cell Line | | Lambda |
| | excision | | | | | ZAP II |
| H0579 | Pericardium | Pericardium | Heart | | | pSport1 |
| H0580 | Dendritic cells, pooled | Pooled dendritic | | | | pCMVSport |
| | | cells | | | | 3.0 |
| HO581 | Human Bone Marrow, | Human Bone | Bone Marrow | | | pCMVSport |
| | treated | Marrow | | | | 3.0 |
| H0583 | B Cell lymphoma | B Cell Lymphoma | B Cell | | disease | pCMVSport |
| | | | | | | 3.0 |
| H0586 | Healing groin wound, 6.5 | healing groin | groin | | disease | pCMVSport |
| | hours post incision | wound, 6.5 hours | | | | 3.0 |
| | | post incision - 2/ | | | | |
| H0587 | Healing groin wound; 7.5 | Groin-2/19/97 | groin | | disease | pCMVSport |
| | hours post incision | | | | | 3.0 |
| H0589 | CD34 positive cells (cord | CD34 Positive Cells | Cord Blood | | | ZAP Express |
| | blood), re-ex | | | | | |
| H0590 | Human adult small | Human Adult Small | Small Int. | | | Uni-ZAP XR |
| | intestine, re-excision | Intestine | | | | |
| H0591 | Human T-cell | T-Cell Lymphoma | T-Cell | | disease | Uni-ZAP XR |
| | lymphoma; re-excision | | | | | |
| H0592 | Healing groin wound - | HGS wound healing | | | disease | pCMVSport |
| | zero hr post-incision | project; abdomen | | | | 3.0 |
| | (control) | | | | | |
| H0593 | Olfactory | Olfactory epithelium | | | | pCMVSport |
| | epithelium; nasalcavity | from roof of left | | | | 3.0 |
| | | nasal cacit | | | | |
| H0594 | Human Lung Cancer; re- | Human Lung Cancer | Lung | | disease | Lambda |
| | excision | | | | | ZAP II |
| H0595 | Stomach cancer | Stomach Cancer - | | | disease | Uni-ZAP XR |
| | (human); re-excision | 5383A (human) | | | | |
| H0596 | Human Colon Cancer; re- | Human Colon | Colon | | | Lambda |
| | excision | Cancer | | | | ZAP II |
| H0597 | Human Colon; re-excision | Human Colon | | | | Lambda |
| | | | | | | ZAP II |
| H0598 | Human Stomach; re- | Human Stomach | Stomach | | | Uni-ZAP XR |
| | excision | | | | | |
| H0599 | Human Adult Heart; re- | Human Adult Heart | Heart | | | Uni-ZAP XR |
| | excision | | | | | |
| H0600 | Healing Abdomen | Abdomen | | | disease | pCMVSport |
| | wound; 70&90 min post | | | | | 3.0 |
| | incision | | | | | |
| H0601 | Healing Abdomen | Abdomen | | | disease | pCMVSport |
| | Wound; 15 days post | | | | | 3.0 |
| | incision | | | | | |
| H0604 | Human Pituitary, re- | Human Pituitary | | | | pBluescript |
| | excision | | | | | |
| H0606 | Human Primary Breast | Human Primary | Breast | | disease | Uni-ZAP XR |
| | Cancer; re-excision | Breast Cancer | | | | |
| H0608 | H. Leukocytes, control | H. Leukocytes | | | | pCMVSport |
| | | | | | | 1 |
| H0609 | H. Leukocytes, | H. Leukocytes | | | | pCMVSport |
| | normalized cot > 500 A | | | | | 1 |
| H0614 | H. Leukocytes, | H. Leukocytes | | | | pCMVSport |
| | normalized cot 500 A | | | | | |
| H0615 | Human Ovarian Cancer | Ovarian Cancer | Ovary | | disease | Uni-ZAP XR |
| | Reexcision | | | | | |
| H0616 | Human Testes, Reexcision | Human Testes | Testis | | | Uni-ZAP XR |
| H0617 | Human Primary Breast | Human Primary | Breast | | disease | Uni-ZAP XR |
| | Cancer Reexcision | Breast Cancer | | | | |
| H0618 | Human Adult Testes, | Human Adult Testis | Testis | | | Uni-ZAP XR |
| | Large Inserts, Reexcision | | | | | |
| H0619 | Fetal Heart | Human Fetal Heart | Heart | | | Uni-ZAP XR |
| H0620 | Human Fetal Kidney; | Human Fetal Kidney | Kidney | | | Uni-ZAP XR |
| | Reexcision | | | | | |
| H0622 | Human Pancreas Tumor; | Human Pancreas | Pancreas | | disease | Uni-ZAP XR |
| | Reexcision | Tumor | | | | |
| H0623 | Human Umbilical Vein; | Human Umbilical | Umbilical | | | Uni-ZAP XR |
| | Reexcision | Vein Endothelial | vein | | | |
| | | Cells | | | | |
| H0624 | 12 Week Early Stage | Twelve Week Old | Embryo | | | Uni-ZAP XR |
| | Human II; Reexcision | Early Stage Human | | | | |
| H0625 | Ku 812F Basophils Line | Ku 812F Basophils | | | | pSport1 |
| H0626 | Saos2 Cells; Untreated | Saos2 Cell Line; | | | | pSport1 |
| | | Untreated | | | | |
| H0628 | Human Pre-Differentiated | Human Pre- | | | | Uni-ZAP XR |
| | Adipocytes | Differentiated | | | | |
| | | Adipocytes | | | | |
| H0631 | Saos2, Dexamethosome | Saos2 Cell Line; | | | | pSport1 |
| | Treated | Dexamethosome | | | | |
| | | Treated | | | | |
| H0632 | Hepatocellular Tumor; re- | Hepatocellular | Liver | | | Lambda |
| | excision | Tumor | | | | ZAP II |
| H0633 | Lung Carcinoma A549 | TNF alpha activated | | | disease | pSport1 |
| | TNF alpha activated | A549--Lung | | | | |
| | | Carcinoma | | | | |
| H0634 | Human Testes Tumor, re- | Human Testes | Testis | | disease | Uni-ZAP XR |
| | excision | Tumor | | | | |
| H0635 | Human Activated T-Cells, | Activated T-Cells | Blood | Cell Line | | Uni-ZAP XR |
| | re-excision | | | | | |
| H0637 | Dendritic Cells From | Dentritic cells from | | | | pSport1 |
| | CD34 Cells | CD34 cells | | | | |
| H0638 | CD40 activated monocyte | CD40 activated | | | | pSport1 |
| | dendridic cells | monocyte dendridic | | | | |
| | | cells | | | | |
| H0639 | Ficolled Human Stromal | Ficolled Human | | | | Other |
| | Cells, 5Fu treated | Stromal Cells, 5Fu | | | | |
| | | treated | | | | |
| H0641 | LPS activated derived | LPS activated | | | | pSport1 |
| | dendritic cells | monocyte derived | | | | |
| | | dendritic cells | | | | |
| H0642 | Hep G2 Cells, lambda | Hep G2 Cells | | | | Other |
| | library | | | | | |
| H0643 | Hep G2 Cells, PCR library | Hep G2 Cells | | | | Other |
| H0644 | Human Placenta (re- | Human Placenta | Placenta | | | Uni-ZAP XR |
| | excision) | | | | | |
| H0645 | Fetal Heart, re-excision | Human Fetal Heart | Heart | | | Uni-ZAP XR |
| H0646 | Lung, Cancer (4005313 | Metastatic | | | | pSport1 |
| | A3): Invasive Poorly | squamous cell lung | | | | |
| | Differentiated Lung | carcinoma, poorly di | | | | |
| | Adenocarcinoma, | | | | | |
| H0647 | Lung, Cancer (4005163 | Invasive poorly | | | disease | pSport1 |
| | B7): Invasive, Poorly Diff, | differentiated lung | | | | |
| | Adenocarcinoma, | adenocarcinoma | | | | |
| | Metastatic | | | | | |
| H0648 | Ovary, Cancer: (4004562 | Papillary Cstic | | | disease | pSport1 |
| | B6) Papillary Serous | neoplasm of low | | | | |
| | Cystic Neoplasm, Low | malignant potentia | | | | |
| | Malignant Pot | | | | | |
| H0649 | Lung, Normal: (4005313 | Normal Lung | | | | pSport1 |
| | B1) | | | | | |
| H0650 | B-Cells | B-Cells | | | | pCMVSport |
| | | | | | | 3.0 |
| H0651 | Ovary, Normal: | Normal Ovary | | | | pSport1 |
| | (9805C040R) | | | | | |
| H0652 | Lung, Normal: (4005313B1) | Normal Lung | | | | pSport1 |
| H0653 | Stromal Cells | Stromal Cells | | | | pSport1 |
| H0656 | B-cells (unstimulated) | B-cells | | | | pSport1 |
| | | (unstimulated) | | | | |
| H0657 | B-cells (stimulated) | B-cells (stimulated) | | | | pSport1 |
| H0658 | Ovary, Cancer | 9809C332-Poorly | Ovary & | | disease | pSport1 |
| | (9809C332): Poorly | differentiate | Fallopian | | | |
| | differentiated | | Tubes | | | |
| | adenocarcinoma | | | | | |
| H0659 | Ovary, Cancer | Grade II Papillary | Ovary | | disease | pSport1 |
| | (15395A1F): Grade II | Carcinoma, Ovary | | | | |
| | Papillary Carcinoma | | | | | |
| H0660 | Ovary, Cancer: | Poorly differentiated | | | disease | pSport1 |
| | (15799A1F) Poorly | carcinoma, ovary | | | | |
| | differentiated carcinoma | | | | | |
| H0661 | Breast, Cancer: (4004943A5) | Breast cancer | | | disease | pSport1 |
| H0662 | Breast, Normal: | Normal Breast - | Breast | | | pSport1 |
| | (4005522B2) | #4005522(B2) | | | | |
| H0663 | Breast, Cancer: (4005522A2) | Breast Cancer - | Breast | | disease | pSport1 |
| | | #4005522(A2) | | | | |
| H0664 | Breast, Cancer: | Breast Cancer | Breast | | disease | pSport1 |
| | (9806C012R) | | | | | |
| H0665 | Stromal cells 3.88 | Stromal cells 3.88 | | | | pSport1 |
| H0666 | Ovary, Cancer: (4004332A2) | Ovarian Cancer, | | | disease | pSport1 |
| | | Sample | | | | |
| | | #4004332A2 | | | | |
| H0667 | Stromal cells(HBM3.18) | Stromal cell(HBM | | | | pSport1 |
| | | 3.18) | | | | |
| H0668 | stromal cell clone 2.5 | stromal cell clone | | | | pSport1 |
| | | 2.5 | | | | |
| H0670 | Ovary, Cancer(4004650A3): | Ovarian Cancer - | | | | pSport1 |
| | Well-Differentiated | 4004650A3 | | | | |
| | Micropapillary Serous | | | | | |
| | Carcinoma | | | | | |
| H0672 | Ovary, Cancer: (4004576A8) | Ovarian | Ovary | | | pSport1 |
| | | Cancer(4004576A8) | | | | |
| H0673 | Human Prostate Cancer, | Human Prostate | Prostate | | | Uni-ZAP XR |
| | Stage B2; re-excision | Cancer, stage B2 | | | | |
| H0674 | Human Prostate Cancer, | Human Prostate | Prostate | | | Uni-ZAP XR |
| | Stage C; re-excission | Cancer, stage C | | | | |
| H0675 | Colon, Cancer: | Colon Cancer | | | | pCMVSport |
| | (9808C064R) | 9808C064R | | | | 3.0 |
| H0676 | Colon, Cancer: | Colon Cancer | | | | pCMVSport |
| | (9808C064R)-total RNA | 9808C064R | | | | 3.0 |
| H0677 | TNFR degenerate oligo | B-Cells | | | | PCRII |
| H0682 | Serous Papillary | serous papillary | | | | pCMVSport |
| | Adenocarcinoma | adenocarcinoma | | | | 3.0 |
| | | (9606G304SPA3B) | | | | |
| H0683 | Ovarian Serous Papillary | Serous papillary | | | | pCMVSport |
| | Adenocarcinoma | adenocarcinoma, | | | | 3.0 |
| | | stage 3C (9804G01 | | | | |
| H0684 | Serous Papillary | Ovarian Cancer- | Ovaries | | | pCMVSport |
| | Adenocarcinoma | 9810G606 | | | | 3.0 |
| H0685 | Adenocarcinoma of | Adenocarcinoma of | | | | pCMVSport |
| | Ovary, Human Cell Line, | Ovary, Human Cell | | | | 3.0 |
| | # OVCAR-3 | Line, # OVCAR- | | | | |
| H0686 | Adenocarcinoma of | Adenocarcinoma of | | | | pCMVSport |
| | Ovary, Human Cell Line | Ovary, Human Cell | | | | 3.0 |
| | | Line, # SW-626 | | | | |
| H0687 | Human normal | Human normal | Ovary | | | pCMVSport |
| | ovary (#9610G215) | ovary (#9610G215) | | | | 3.0 |
| H0688 | Human Ovarian | Human Ovarian | | | | pCMVSport |
| | Cancer (#9807G017) | cancer (#9807G017), | | | | 3.0 |
| | | mRNA from Maura | | | | |
| | | Ru | | | | |
| H0689 | Ovarian Cancer | Ovarian Cancer, | | | | pCMVSport |
| | | #9806G019 | | | | 3.0 |
| H0690 | Ovarian Cancer, # | Ovarian Cancer, | | | | pCMVSport |
| | 9702G001 | #9702G001 | | | | 3.0 |
| H0692 | BLyS Receptor from | B Cell Lymphoma | B Cell | | | pCMVSport |
| | Expression Cloning | | | | | 3.0 |
| H0693 | Normal Prostate | Normal Prostate | | | | pCMVSport |
| | #ODQ3958EN | Tissue | | | | 3.0 |
| | | #ODQ3958EN | | | | |
| H0695 | mononucleocytes from | mononucleocytes | | | | pCMVSport |
| | patient | from patient at | | | | 3.0 |
| | | Shady Grove Hospit | | | | |
| N0006 | Human Fetal Brain | Human Fetal Brain | | | | |
| S0001 | Brain frontal cortex | Brain frontal cortex | Brain | | | Lambda |
| | | | | | | ZAP II |
| S0002 | Monocyte activated | Monocyte-activated | blood | Cell Line | | Uni-ZAP XR |
| S0003 | Human Osteoclastoma | Osteoclastoma | bone | | disease | Uni-ZAP XR |
| S0005 | Heart | Heart-left ventricle | Heart | | | pCDNA |
| S0007 | Early Stage Human Brain | Human Fetal Brain | | | | Uni-ZAP XR |
| S0010 | Human Amygdala | Amygdala | | | | Uni-ZAP XR |
| S0011 | STROMAL - | Osteoclastoma | bone | | disease | Uni-ZAP XR |
| | OSTEOCLASTOMA | | | | | |
| S0013 | Prostate | Prostate | prostate | | | Uni-ZAP XR |
| S0014 | Kidney Cortex | Kidney cortex | Kidney | | | Uni-ZAP XR |
| S0022 | Human Osteoclastoma | Osteoclastoma | | | | Uni-ZAP XR |
| | Stromal Cells - | Stromal Cells | | | | |
| | unamplified | | | | | |
| S0023 | Human Kidney Cortex - | Human Kidney | | | | |
| | unamplified | Cortex | | | | |
| S0024 | Human Kidney Medulla - | Human Kidney | | | | |
| | unamplified | Medulla | | | | |
| S0026 | Stromal cell TF274 | stromal cell | Bone marrow | Cell Line | | Uni-ZAP XR |
| S0027 | Smooth muscle, serum | Smooth muscle | Pulmanary | Cell Line | | Uni-ZAP XR |
| | treated | | artery | | | |
| S0028 | Smooth muscle, control | Smooth muscle | Pulmanary | Cell Line | | Uni-ZAP XR |
| | | | artery | | | |
| S0029 | brain stem | Brain stem | brain | | | Uni-ZAP XR |
| S0030 | Brain pons | Brain Pons | Brain | | | Uni-ZAP XR |
| S0031 | Spinal cord | Spinal cord | spinal cord | | | Uni-ZAP XR |
| S0032 | Smooth muscle-ILb | Smooth muscle | Pulmanary | Cell Line | | Uni-ZAP XR |
| | induced | | artery | | | |
| S0036 | Human Substantia Nigra | Human Substantia | | | | Uni-ZAP XR |
| | | Nigra | | | | |
| S0037 | Smooth muscle, IL1b | Smooth muscle | Pulmanary | Cell Line | | Uni-ZAP XR |
| | induced | | artery | | | |
| S0038 | Human Whole Brain #2 - | Human Whole Brain | | | | ZAP Express |
| | Oligo dT > 1.5 Kb | #2 | | | | |
| S0040 | Adipocytes | Human Adipocytes | | | | Uni-ZAP XR |
| | | from Osteoclastoma | | | | |
| S0042 | Testes | Human Testes | | | | ZAP Express |
| S0044 | Prostate BPH | prostate BPH | Prostate | | disease | Uni-ZAP XR |
| S0045 | Endothelial cells-control | Endothelial cell | endothelial | Cell Line | | Uni-ZAP XR |
| | | | cell-lung | | | |
| S0046 | Endothelial-induced | Endothelial cell | endothelial | Cell Line | | Uni-ZAP XR |
| | | | cell-lung | | | |
| S0049 | Human Brain, Striatum | Human Brain, | | | | Uni-ZAP XR |
| | | Striatum | | | | |
| S0050 | Human Frontal Cortex, | Human Frontal | | | disease | Uni-ZAP XR |
| | Schizophrenia | Cortex, | | | | |
| | | Schizophrenia | | | | |
| S0051 | Human | Human | | | disease | Uni-ZAP XR |
| | Hypothalmus, | Hypothalamus, | | | | |
| | Schizophrenia | Schizophrenia | | | | |
| S0052 | neutrophils control | human neutrophils | blood | Cell Line | | Uni-ZAP XR |
| S0053 | Neutrophils IL-1 and LPS | human neutrophil | blood | Cell Line | | Uni-ZAP XR |
| | induced | induced | | | | |
| S0106 | STRIATUM | | BRAIN | | disease | Uni-ZAP XR |
| | DEPRESSION | | | | | |
| S0112 | Hypothalamus | | Brain | | | Uni-ZAP XR |
| S0114 | Anergic T-cell | Anergic T-cell | | Cell Line | | Uni-ZAP XR |
| S0116 | Bone marrow | Bone marrow | Bone marrow | | | Uni-ZAP XR |
| S0122 | Osteoclastoma-normalized | Osteoclastoma | bone | | disease | pBluescript |
| | A | | | | | |
| S0126 | Osteoblasts | Osteoblasts | Knee | Cell Line | | Uni-ZAP XR |
| S0132 | Epithelial-TNFa and INF | Airway Epithelial | | | | Uni-ZAP XR |
| | induced | | | | | |
| S0134 | Apoptotic T-cell | apoptotic cells | | Cell Line | | Uni-ZAP XR |
| S0136 | PERM TF274 | stromal cell | Bone marrow | Cell Line | | Lambda |
| | | | | | | ZAP II |
| S0142 | Macrophage-oxLDL | macrophage- | blood | Cell Line | | Uni-ZAP XR |
| | | oxidized LDL | | | | |
| | | treated | | | | |
| S0144 | Macrophage (GM-CSF | Macrophage (GM- | | | | Uni-ZAP XR |
| | treated) | CSF treated) | | | | |
| S0146 | prostate-edited | prostate BPH | Prostate | | | Uni-ZAP XR |
| S0148 | Normal Prostate | Prostate | prostate | | | Uni-ZAP XR |
| S0150 | LNCAP prostate cell line | LNCAP Cell Line | Prostate | Cell Line | | Uni-ZAP XR |
| S0152 | PC3 Prostate cell line | PC3 prostate cell | | | | Uri-ZAP XR |
| | | line | | | | |
| S0168 | Prostate/LNCAP, | PC3 prostate cell | | | | pBluescript |
| | subtraction I | line | | | | |
| S0174 | Prostate-BPH subtracted II | Human Prostate | | | | pBluescript |
| | | BPH | | | | |
| S0182 | Human B Cell 8866 | Human B- Cell 8866 | | | | Uni-ZAP XR |
| S0192 | Synovial Fibroblasts | Synovial Fibroblasts | | | | pSport1 |
| | (control) | | | | | |
| S0194 | Synovial hypoxia | Synovial Fibroblasts | | | | pSport1 |
| S0196 | Synovial IL-1/TNF | Synovial Fibroblasts | | | | pSport1 |
| | stimulated | | | | | |
| S0198 | 7TM-pbfd | PBLS, 7TM | | | | PCRII |
| | | receptor enriched | | | | |
| S0206 | Smooth Muscle- HASTE | Smooth muscle | Pulmanary | Cell Line | | pBluescript |
| | normalized | | artery | | | |
| S0208 | Messangial cell, frac 1 | Messangial cell | | | | pSort1 |
| S0210 | Messangial cell, frac 2 | Messangial cell | | | | pSport1 |
| S0212 | Bone Marrow Stromal | Bone Marrow | | | | pSport1 |
| | Cell, untreated | Stromal | | | | |
| | | Cell, untreated | | | | |
| S0214 | Human Osteoclastoma, re- | Osteoclastoma | bone | | disease | Uni-ZAP XR |
| | excision | | | | | |
| S0216 | Neutrophils IL-1 and LPS | human neutrophil | blood | Cell Line | | Uni-ZAP XR |
| | induced | induced | | | | |
| S0218 | Apoptotic T-cell, re- | apoptotic cells | | Cell Line | | Uni-ZAP XR |
| | excision | | | | | |
| S0220 | H. hypothalamus, frac | Hypothalamus | Brain | | | ZAP Express |
| | A; re-excision | | | | | |
| S0222 | H. Frontal | H. Brain, Frontal | Brain | | disease | Uni-ZAP XR |
| | cortex, epileptic; re- | Cortex, Epileptic | | | | |
| | excision | | | | | |
| S0228 | PSMIX | PBLS, 7TM | | | | PCRII |
| | | receptor enriched | | | | |
| S0242 | Synovial Fibroblasts | Synovial Fibroblasts | | | | pSport1 |
| | (II1/TNF), subt | | | | | |
| S0250 | Human Osteoblasts II | Human Osteoblasts | Femur | | disease | pCMVSport |
| | | | | | | 2.0 |
| S0252 | 7TM-PIMIX | PBLS, 7TM | | | | PCRII |
| | | receptor enriched | | | | |
| S0260 | Spinal Cord, re-excision | Spinal cord | spinal cord | | | Uni-ZAP XR |
| S0264 | PPMIX | PPMIX (Human | Pituitary | | | PCRII |
| | | Pituitary) | | | | |
| S0268 | PRMIX | PRMIX (Human | prostate | | | PCRII |
| | | Prostate) | | | | |
| S0270 | PTMIX | PTMIX (Human | Thymus | | | PCRII |
| | | Thymus) | | | | |
| S0274 | PCMIX | PCMIX (Human | Brain | | | PCRII |
| | | Cerebellum) | | | | |
| S0276 | Synovial hypoxia-RSF | Synovial fobroblasts | Synovial | | | pSport1 |
| | subtracted | (rheumatoid) | tissue | | | |
| S0278 | H Macrophage (GM-CSF | Macrophage (GM- | | | | Uni-ZAP XR |
| | treated), re-excision | CSF treated) | | | | |
| S0280 | Human Adipose Tissue, | Human Adipose | | | | Uni-ZAP XR |
| | re-excision | Tissue | | | | |
| S0282 | Brain Frontal Cortex, re- | Brain frontal cortex | Brain | | | Lambda |
| | excision | | | | | ZAP II |
| S0294 | Larynx tumor | Larynx tumor | Larynx, vocal | | disease | pSport1 |
| | | | cord | | | |
| S0298 | Bone marrow | Bone marrow | Bone marrow | | | pSport1 |
| | stroma, treated | stroma, treatedSB | | | | |
| S0300 | Frontal lobe, dementia; re- | Frontal Lobe | Brain | | | Uni-ZAP XR |
| | excision | dementia/Alzheimer′′s | | | | |
| S0306 | Larynx normal #10 261- | Larynx normal | | | | pSport1 |
| | 273 | | | | | |
| S0308 | Spleen/normal | Spleen normal | | | | pSport1 |
| S0310 | Normal trachea | Normal trachea | | | | pSport1 |
| S0312 | Human | Human | | | disease | pSport1 |
| | osteoarthritic; fraction II | osteoarthritic | | | | |
| | | cartilage | | | | |
| S0314 | Human | Human | | | disease | pSport1 |
| | osteoarthritis; fraction I | osteoarthritic | | | | |
| | | cartilage | | | | |
| S0316 | Human Normal | Human Normal | | | | pSport1 |
| | Cartilage, Fraction I | Cartilage | | | | |
| S0318 | Human Normal Cartilage | Human Normal | | | | pSport1 |
| | Fraction II | Cartilage | | | | |
| S0328 | Palate carcinoma | Palate carcinoma | Uvula | | disease | pSport1 |
| S0330 | Palate normal | Palate normal | Uvula | | | pSport1 |
| S0332 | Pharynx carcinoma | Pharynx carcinoma | Hypopharynx | | | pSport1 |
| S0334 | Human Normal Cartilage | Human Normal | | | | pSport1 |
| | Fraction III | Cartilage | | | | |
| S0338 | Human Osteoarthritic | Human | | | disease | pSport1 |
| | Cartilage Fraction III | osteoarthritic | | | | |
| | | cartilage | | | | |
| S0340 | Human Osteoarthritic | Human | | | disease | pSport1 |
| | Cartilage Fraction IV | osteoarthritic | | | | |
| | | cartilage | | | | |
| S0342 | Adipocytes; re-excision | Human Adipocytes | | | | Uni-ZAP XR |
| | | from Osteoclastoma | | | | |
| S0344 | Macrophage-oxLDL; re- | macrophage- | blood | Cell Line | | Uni-ZAP XR |
| | excision | oxidized LDL | | | | |
| | | treated | | | | |
| S0346 | Human Amygdala; re- | Amygdala | | | | Uni-ZAP XR |
| | excision | | | | | |
| S0350 | Pharynx Carcinoma | Pharynx carcinoma | Hypopharynx | | disease | pSport1 |
| S0352 | Larynx Carcinoma | Larynx carcinoma | | | disease | pSport1 |
| S0354 | Colon Normal II | Colon Normal | Colon | | | pSport1 |
| S0356 | Colon Carcinoma | Colon Carcinoma | Colon | | disease | pSport1 |
| S0358 | Colon Normal III | Colon Normal | Colon | | | pSport1 |
| S0360 | Colon Tumor II | Colon Tumor | Colon | | disease | pSport1 |
| S0362 | Human Gastrocnemius | Gastrocnemius | | | | pSport1 |
| | | muscle | | | | |
| S0364 | Human Quadriceps | Quadriceps muscle | | | | pSport1 |
| S0366 | Human Soleus | Soleus Muscle | | | | pSport1 |
| S0370 | Larynx carcinoma II | Larynx carcinoma | | | disease | pSport1 |
| S0374 | Normal colon | Normal colon | | | | pSport1 |
| S0376 | Colon Tumor | Colon Tumor | | | disease | pSport1 |
| S0378 | Pancreas normal PCA4 | Pancreas Normal | | | | pSport1 |
| | No | PCA4 No | | | | |
| S0380 | Pancreas Tumor PCA4 Tu | Pancreas Tumor | | | disease | pSport1 |
| | | PCA4 Tu | | | | |
| S0386 | Human Whole Brain, re- | Whole brain | Brain | | | ZAP Express |
| | excision | | | | | |
| S0388 | Human | Human | | | disease | Uni-ZAP XR |
| | Hypothalamus, | Hypothalamus, | | | | |
| | schizophrenia, | Schizophrenia | | | | |
| | re-excision | | | | | |
| S0390 | Smooth muscle, control; | Smooth muscle | Pulmanary | Cell Line | | Uni-ZAP XR |
| | re-excision | | artery | | | |
| S0392 | Salivary Gland | Salivary gland; | | | | pSport1 |
| | | normal | | | | |
| S0400 | Brain; normal | Brain; normal | | | | pSport1 |
| S0404 | Rectum normal | Rectum, normal | | | | pSport1 |
| S0406 | Rectum tumour | Rectum tumour | | | | pSport1 |
| S0408 | Colon, normal | Colon, normal | | | | pSport1 |
| S0410 | Colon, tumour | Colon, tumour | | | | pSport1 |
| S0412 | Temporal cortex- | Temporal cortex, | | | disease | Other |
| | Alzheizmer; subtracted | alzheimer | | | | |
| S0414 | Hippocampus, Alzheimer | Hippocampus, | | | | Other |
| | Subtracted | Alzheimer | | | | |
| | | Subtracted | | | | |
| S0418 | CHME Cell Line; treated 5 | CHME Cell Line; | | | | pCMVSport |
| | hrs | treated | | | | 3.0 |
| S0420 | CHME Cell | CHME Cell line, | | | | pSport1 |
| | Line, untreated | untreatetd | | | | |
| S0422 | Mo7e Cell Line GM-CSF | Mo7e Cell Line | | | | pCMVSport |
| | treated (1 nglml) | GM-CSF treated | | | | 3.0 |
| | | (1 ng/ml) | | | | |
| S0424 | TF-1 Cell Line GM-CSF | TF-1 Cell Line | | | | pSport1 |
| | Treated | GM-CSF Treated | | | | |
| S0426 | Monocyte activated; re- | Monocyte-activated | blood | Cell Line | | Uni-ZAP XR |
| | excision | | | | | |
| S0428 | Neutrophils control; re- | human neutrophils | blood | Cell Line | | Uni-ZAP XR |
| | excision | | | | | |
| S0430 | Aryepiglottis Normal | Aryepiglottis | | | | pSport1 |
| | | Normal | | | | |
| S0432 | Sinus piniformis Tumour | Sinus piniformis | | | | pSport1 |
| | | Tumour | | | | |
| S0434 | Stomach Normal | Stomach Normal | | | disease | pSport1 |
| S0436 | Stomach Tumour | Stomach Tumour | | | disease | pSport1 |
| S0438 | Liver Normal Met5No | Liver Normal | | | | pSport1 |
| | | Met5No | | | | |
| S0440 | Liver Tumour Met 5 Tu | Liver Tumour | | | | pSport1 |
| S0442 | Colon Normal | Colon Normal | | | | pSport1 |
| S0444 | Colon Tumor | Colon Tumour | | | disease | pSport1 |
| S0446 | Tongue Tumour | Tongue Tumour | | | | pSport1 |
| S0448 | Larynx Normal | Larynx Normal | | | | pSport1 |
| S0450 | Larynx Tumour | Larynx Tumour | | | | pSport1 |
| S0452 | Thymus | Thymus | | | | pSport1 |
| S0456 | Tongue Normal | Tongue Normal | | | | pSport1 |
| S0458 | Thyroid Normal (SDCA2 | Thyroid normal | | | | pSport1 |
| | No) | | | | | |
| S0460 | Thyroid Tumour | Thyroid Tumour | | | | pSport1 |
| S0462 | Thyroid Thyroiditis | Thyroid Thyroiditis | | | | pSport1 |
| S0464 | Larynx Normal | Larynx Normal | | | | pSport1 |
| S0468 | Ea.hy.926 cell line | Ea.hy.926 cell line | | | | pSport1 |
| S0472 | Lung Mesothelium | PYBT | | | | pSport1 |
| S0474 | Human blood platelets | Platelets | Blood | | | Other |
| | | | platelets | | | |
| S0665 | Human Amygdala; re- | Amygdala | | | | Uni-ZAP XR |
| | excission | | | | | |
| S3012 | Smooth Muscle Serum | Smooth muscle | Pulmanary | Cell Line | | pBluescript |
| | Treated, Norm | | artery | | | |
| S3014 | Smooth muscle, serum | Smooth muscle | Pulmanary | Cell Line | | pBluescript |
| | induced, re-exc | | artery | | | |
| S6014 | H. hypothalamus, frac A | Hypothalamus | Brain | | | ZAP Express |
| S6016 | H Frontal Cortex, | H. Brain, Frontal | Brain | | disease | Uni-ZAP XR |
| | Epileptic | Cortex, Epileptic | | | | |
| S6022 | H. Adipose Tissue | Human Adipose | | | | Uni-ZAP XR |
| | | Tissue | | | | |
| S6024 | Alzheimers, spongy | Alzheimer″s/Spongy | Brain | | disease | Uni-ZAP XR |
| | change | change | | | | |
| S6026 | Frontal Lobe, Dementia | Frontal Lobe | Brain | | | Uni-ZAP XR |
| | | dementia/Alzheimer′′s | | | | |
| S6028 | Human Manic Depression | Human Manic | Brain | | disease | Uni-ZAP XR |
| | Tissue | depression tissue | | | | |
| T0002 | Activated T-cells | Activated T-Cell, | Blood | Cell Line | | pBluescript |
| | | PBL fraction | | | | SK− |
| T0003 | Human Fetal Lung | Human Fetal Lung | | | | pBluescript |
| | | | | | | SK− |
| T0004 | Human White Fat | Human White Fat | | | | pBluescript |
| | | | | | | SK− |
| T0006 | Human Pineal Gland | Human Pinneal | | | | pBluescript |
| | | Gland | | | | SK− |
| T0008 | Colorectal Tumor | Colorectal Tumor | | | disease | pBluescript |
| | | | | | | SK− |
| T0010 | Human Infant Brain | Human Infant Brain | | | | Other |
| T0023 | Human Pancreatic | Human Pancreatic | | | disease | pBluescript |
| | Carcinoma | Carcinoma | | | | SK− |
| T0039 | HSA 172 Cells | Human HSA172 cell | | | | pBluescript |
| | | line | | | | SK− |
| T0040 | HSC172 cells | SA172 Cells | | | | pBluescript |
| | | | | | | SK− |
| T004l | Jurkat T-cell G1 phase | Jurkat T-cell | | | | pBluescript |
| | | | | | | SK− |
| T0042 | Jurkat T-Cell, S phase | Jurkat T-Cell Line | | | | pBluescript |
| | | | | | | SK− |
| T0048 | Human Aortic | Human Aortic | | | | pBluescript |
| | Endothelium | Endothilium | | | | SK− |
| T0049 | Aorta endothelial cells + | Aorta endothelial | | | | pBluescript |
| | TNF-a | cells | | | | SK− |
| T0060 | Human White Adipose | Human White Fat | | | | pBluescript |
| | | | | | | SK− |
| T0067 | Human Thyroid | Human Thyroid | | | | pBluescript |
| | | | | | | SK− |
| T0068 | Normal Ovary, | Normal Ovary, | | | | pBluescript |
| | Premenopausal | Premenopausal | | | | SK− |
| T0069 | Human Uterus, normal | Human Uterus, | | | | pBluescript |
| | | normal | | | | SK− |
| T0071 | Human Bone Marrow | Human Bone | | | | pBluescript |
| | | Marrow | | | | SK− |
| T0082 | Human Adult Retina | Human Adult Retina | | | | pBluescript |
| | | | | | | SK− |
| T0109 | Human (HCC) cell line | | | | | pBluescript |
| | liver (mouse) metastasis, | | | | | SK− |
| | remake | | | | | |
| T0110 | Human colon carcinoma | | | | | pBluescript |
| | (HCC) cell line, remake | | | | | SK− |
| T0114 | Human (Caco-2) cell line, | | | | | pBluescript |
| | adenocarcinoma, colon, | | | | | SK− |
| | remake | | | | | |
| T0115 | Human Colon Carcinoma | | | | | pBluescript |
| | (HCC) cell line | | | | | SK− |
| L0002 | Atrium cDNA library | | | | | |
| | Human heart | | | | | |
| L0004 | ClonTech HL 1065a | | | | | |
| L0005 | Clontech human aorta | | | | | |
| | polyA+ mRNA (#6572) | | | | | |
| L0015 | Human | | | | | |
| L0021 | Human adult (K. Okubo) | | | | | |
| L0022 | Human adult lung 3″ | | | | | |
| | directed MboI CDNA | | | | | |
| L0040 | Human colon mucosa | | | | | |
| L0053 | Human pancreatic tumor | | | | | |
| L0055 | Human promyelocyte | | | | | |
| L0096 | Subtracted human retina | | | | | |
| L0097 | Subtracted human retinal | | | | | |
| | pigment epithelium (RPE) | | | | | |
| L0l03 | DKFZphamy1 | amygdala | | | | |
| L0105 | Human aorta polyA+ | aorta | | | | |
| | (TFujiwara) | | | | | |
| L0109 | Human brain cDNA | brain | | | | |
| L0118 | Human fetal brain S. | brain | | | | |
| | Meier-Ewert | | | | | |
| L0142 | Human placenta eDNA | placenta | | | | |
| | (TFujiwara) | | | | | |
| L0143 | Human placenta polyA+ | placenta | | | | |
| | (TFujiwara) | | | | | |
| L0151 | Human testis (C. De | testis | | | | |
| | Smet) | | | | | |
| L0157 | Human fetal brain | brain | | | | |
| | (TFujiwara) | | | | | |
| L0163 | Human heart cDNA | | heart | | | |
| | (YNakamura) | | | | | |
| L0351 | Infant brain, Bento Soares | | | | | BA, M13- |
| | | | | | | derived |
| L0352 | Normalized infant brain, | | | | | BA, M13- |
| | Bento Soares | | | | | derived |
| L0356 | S, Human foetal Adrenals | | | | | Bluescript |
| | tissue | | | | | |
| L0361 | Stratagene ovary | | ovary | | | Bluescript |
| | (#937217) | | | | | SK |
| L0362 | Stratagene ovarian cancer | | | | | Bluescript |
| | (#937219) | | | | | SK− |
| L0363 | NCI_CGAP_GC2 | germ cell tumor | | | | Bluescript |
| | | | | | | SK− |
| L0364 | NCI_CGAP_GC5 | germ cell tumor | | | | Bluescript |
| | | | | | | SK− |
| L0365 | NCI_CGAP_Phe1 | pheochromocytoma | | | | Bluescript |
| | | | | | | SK− |
| L0366 | Stratagene schizo brain | schizophrenic brain | | | | Bluescript |
| | S11 | S-11 frontal lobe | | | | SK− |
| L0367 | NCI_CGAP_Sch1 | Schwannoma tumor | | | | Bluescript |
| | | | | | | SK− |
| L0368 | NCI_CGAP_SS1 | synovial sarcoma | | | | Bluescript |
| | | | | | | SK− |
| L0369 | NCI_CGAP_AAI | adrenal adenoma | adrenal gland | | | Bluescript |
| | | | | | | SK− |
| L0370 | Johnston frontal cortex | pooled frontal lobe | brain | | | Bluescript |
| | | | | | | SK− |
| L0371 | NCI_CGAP_Br3 | breast tumor | breast | | | Bluescript |
| | | | | | | SK− |
| L0372 | NCI_CGAP_Col2 | colon tumor | colon | | | Bluescript |
| | | | | | | SK− |
| L0373 | NCI_CGAP_Co11 | tumor | colon | | | Bluescript |
| | | | | | | SK− |
| L0374 | NCI_CGAP_Co2 | tumor | colon | | | Bluescript |
| | | | | | | SK− |
| L0375 | NCI_CGAP_Kid6 | kidney tumor | kidney | | | Bluescript |
| | | | | | | SK− |
| L0376 | NCI_CGAP_Lar1 | larynx | larynx | | | Bluescript |
| | | | | | | SK− |
| L0378 | NCI_CGAP_Lu1 | lung tumor | lung | | | Bluescript |
| | | | | | | SK− |
| L0381 | NCI_CGAP_HN4 | squamous cell | pharynx | | | Bluescnipt |
| | | carcinoma | | | | SK− |
| L0383 | NCI_CGAP_Pr24 | invasive tumor (cell | prostate | | | Bluescript |
| | | line) | | | | SK− |
| L0384 | NCI_CGAP_Pr23 | prostate tumor | prostate | | | Bluescript |
| | | | | | | SK− |
| L0386 | NCI_CGAP_HN3 | squamous cell | tongue | | | Bluescnipt |
| | | carcinoma from base | | | | SK− |
| | | of tongue | | | | |
| L0387 | NCI_CGAP_GCB0 | germinal center B- | tonsil | | | Bluescnipt |
| | | cells | | | | SK− |
| L0388 | NCI_CGAP_HN6 | normal gingiva (cell | | | | Bluescript |
| | | line from | | | | SK− |
| | | immortalized kerati | | | | |
| L0389 | NCI_CGAP_HN5 | normal gingiva (cell | | | | Bluescnipt |
| | | line from primary | | | | SK− |
| | | keratinocyt | | | | |
| L0394 | H, Human adult Brain | | | | | gt11 |
| | Cortex tissue | | | | | |
| L0415 | b4HB3MA Cot8-HAP-Ft | | | | | Lafmid BA |
| L0418 | b4HB3MA-Cot109 + l0− | | | | | Lafmid BA |
| | Bio | | | | | |
| L0435 | Infant brain, LLNL array | | | | | lafmid BA |
| | of Dr. M. Soares 1NIB | | | | | |
| L0438 | normalized infant brain | total brain | brain | | | lafmid BA |
| | cDNA | | | | | |
| L0439 | Soares infant brain 1NIB | | whole brain | | | Lafmid BA |
| L0455 | Human retina cDNA | retina | eye | | | lambda gt10 |
| | randomly primed | | | | | |
| | sublibrary | | | | | |
| L0456 | Human retina cDNA | retina | eye | | | lambda gt10 |
| | Tsp5091-cleaved | | | | | |
| | sublibrary | | | | | |
| L0462 | WATM1 | | | | | lambda gt11 |
| L0465 | TEST1, Human adult | | | | | lambda |
| | Testis tissue | | | | | nm1149 |
| L0471 | Human fetal heart, | | | | | Lambda |
| | Lambda ZAP Express | | | | | ZAP Express |
| L0475 | KG1-a Lambda Zap | | | KG1-a | | Lambda Zap |
| | Express cDNA library | | | | | Express |
| | | | | | | (Stratagene) |
| L0483 | Human pancreatic islet | | | | | Lambda |
| | | | | | | ZAPII |
| L0485 | STRATAGENE Human | skeletal muscle | leg muscle | | | Lambda |
| | skeletal muscle cDNA | | | | | ZAPII |
| | library, cat. #936215. | | | | | |
| L0502 | NCI_CGAP_Brl5 | adenocarcinoma | breast | | | pAMP1 |
| L0514 | NCI_CGAP_Ov31 | papillary serous | ovary | | | pAMP1 |
| | | carcinoma | | | | |
| L0517 | NCI_CGAP_Pr1 | | | | | pAMP10 |
| L0518 | NCI_CGAP_Pr2 | | | | | pAMP10 |
| L0519 | NCI_CGAP_Pr3 | | | | | pAMP10 |
| L0520 | NCI_CGAP_Alv1 | alveolar | | | | pAMP10 |
| | | rhabdomyosarcoma | | | | |
| L0521 | NCI_CGAP_Ew1 | Ewing″s sarcoma | | | | pAMP10 |
| L0523 | NCI_CGAP_Lip2 | liposarcoma | | | | pAMP10 |
| L0526 | NCI_CGAP_Pr12 | metastatic prostate | | | | pAMP10 |
| | | bone lesion | | | | |
| L0527 | NCI_CGAP_Ov2 | ovary | | | | pAMP10 |
| L0528 | NCI_CGAP_Pr5 | prostate | | | | pAMP10 |
| L0529 | NCI_CGAP_Pr6 | prostate | | | | pAMP10 |
| L0530 | NCI_CGAP_Pr8 | prostate | | | | pAMP10 |
| L0533 | NCI_CGAP_HSC1 | stem cells | bone marrow | | | pAMP10 |
| L0534 | Chromosome 7 Fetal | brain | brain | | | pAMP10 |
| | Brain cDNA Library | | | | | |
| L0540 | NCI_CGAP_Pr10 | invasive prostate | prostate | | | pAMP10 |
| | | tumor | | | | |
| L0542 | NCI_CGAP_Pr11 | normal prostatic | prostate | | | pAMP10 |
| | | epithelial cells | | | | |
| L0545 | NCI_CGAP_Pr4.1 | prostatic | prostate | | | pAMP10 |
| | | intraepithelial | | | | |
| | | neoplasia - high | | | | |
| | | grade | | | | |
| L0546 | NCI_CGAP_Pr18 | stroma | prostate | | | pAMP10 |
| L0547 | NCI_CGAP_Pr16 | tumor | prostate | | | pAMP10 |
| L0549 | NCI_CGAP_HN10 | carcinoma in situ | | | | pAMP10 |
| | | from retromolar | | | | |
| | | trigone | | | | |
| L0551 | NCI_CGAP_HN7 | normal squamous | | | | pAMP10 |
| | | epithelium, floor of | | | | |
| | | mouth | | | | |
| L0558 | NCI_CGAP_Ov40 | endometrioid | ovary | | | pAMP10 |
| | | ovarian metastasis | | | | |
| L0562 | Chromosome 7 HeLa | | | HeLa cell | | pAMP10 |
| | cDNA Library | | | line; | | |
| | | | | ATCC | | |
| L0563 | Human Bone Marrow | bone marrow | | | | pBluescript |
| | Stromal Fibroblast | | | | | |
| L0564 | Jia bone marrow stroma | bone marrow stroma | | | | pBluescript |
| L0565 | Normal Human | Bone | Hip | | | pBluescript |
| | Trabecular Bone Cells | | | | | |
| L0581 | Stratagene liver (#937224) | | liver | | | pBluescript |
| | | | | | | SK |
| L0584 | Stratagene cDNA library | | | | | pBluescript |
| | Human heart, cat#936208 | | | | | SK(+) |
| L0588 | Stratagene endothelial cell | | | | | pBluescript |
| | 937223 | | | | | SK− |
| L0589 | Stratagene fetal retina | | | | | pBluescript |
| | 937202 | | | | | SK− |
| L0590 | Stratagene fibroblast | | | | | pBluescript |
| | (#937212) | | | | | SK− |
| L0591 | Stratagene HeLa cell s3 | | | | | pBluescript |
| | 937216 | | | | | SK− |
| L0592 | Stratagene h, NT neuron | | | | | pBluescript |
| | (#937233) | | | | | SK− |
| L0593 | Stragene | | | | | pBluescript |
| | neuroepithelium | | | | | SK− |
| | (#937231) | | | | | |
| L0594 | Stratagene | | | | | pBluescript |
| | neuroepithelium | | | | | SK− |
| | NT2RAMI 937234 | | | | | |
| L0595 | Stratagene NT2 neuronal | neuroepithelial cells | brain | | | pBluescript |
| | precursor 937230 | | | | | SK− |
| L0596 | Stratagene colon | | colon | | | pBluescript |
| | (#937204) | | | | | SK− |
| L0597 | Stratagene corneal stroma | | cornea | | | pBluescript |
| | (#937222) | | | | | SK− |
| L0598 | Morton Fetal Cochlea | cochlea | ear | | | pBluescript |
| | | | | | | SK− |
| L0599 | Stratagene lung (#937210) | | lung | | | pBluescript |
| | | | | | | SK− |
| L0600 | Weizmann Olfactory | olfactory epithelium | nose | | | pBluescript |
| | Epithelium | | | | | SK− |
| L0601 | Stratagene pancreas | | pancreas | | | pBluescript |
| | (#937208) | | | | | SK− |
| L0602 | Pancreatic Islet | pancreatic islet | pancreas | | | pBluescript |
| | | | | | | SK− |
| L0603 | Stratagene placenta | | placenta | | | pBluescript |
| | (#937225) | | | | | SK− |
| L0604 | Stratagene muscle 937209 | muscle | skeletal | | | pBluescript |
| | | | muscle | | | SK− |
| L0605 | Stratagene fetal spleen | fetal spleen | spleen | | | pBluescript |
| | (#937205) | | | | | SK− |
| L0606 | NCI_CGAP_Lym5 | follicular lymphoma | lymph node | | | pBluescript |
| | | | | | | SK− |
| L0608 | Stratagene lung carcinoma | lung carcinoma | lung | NCI-H69 | | pBluescript |
| | 937218 | | | | | SK− |
| L0615 | 22 week old human fetal | | | | | pBluescriptII |
| | liver cDNA library | | | | | SK(-) |
| L0617 | Chromosome 22 exon | | | | | pBluescriptII |
| | | | | | | KS+ |
| L0618 | Chromosome 9 exon | | | | | pBluescriptII |
| | | | | | | KS+ |
| L0619 | Chromosome 9 exon II | | | | | pBluescriptII |
| | | | | | | KS+ |
| L0622 | HM1 | | | | | pcDNAII |
| | | | | | | (Invitrogen) |
| L0623 | HM3 | pectoral muscle | | | | pcDNAII |
| | | (after mastectomy) | | | | (Invitrogen) |
| L0629 | NCI_CGAP_Me13 | metastatic | bowel (skin | | | pCMV- |
| | | melanoma to bowel | primary) | | | SPORT4 |
| L0630 | NCI_CGAP_CNS1 | substantia nigra | brain | | | pCMV- |
| | | | | | | SPORT4 |
| L0631 | NCI_CGAP_Br7 | | breast | | | pCMV- |
| | | | | | | SPORT4 |
| L0635 | NCI_CGAP_PNS1 | dorsal root ganglion | peripheral | | | pCMV- |
| | | | nervous | | | SPORT4 |
| | | | system | | | |
| L0636 | NCI_CGAP_Pit1 | four pooled pituitary | brain | | | pCMV- |
| | | adenomas | | | | SPORT6 |
| L0637 | NCI_CGAP_Brn53 | three pooled | brain | | | pCMV- |
| | | meningiomas | | | | SPORT6 |
| L0638 | NCI_CGAP_Brn35 | tumor, 5 pooled (see | brain | | | pCMV- |
| | | description) | | | | SPORT6 |
| L0639 | NCI_CGAP_Brn52 | tumor, 5 pooled (see | brain | | | pCMV- |
| | | description) | | | | SPORT6 |
| L0640 | NCI_CGAP_Brl8 | four pooled high- | breast | | | pCMV- |
| | | grade tumors, | | | | SPORT6 |
| | | including two prima | | | | |
| L0641 | NCI_CGAP_Co17 | juvenile granulosa | colon | | | pCMV- |
| | | tumor | | | | SPORT6 |
| L0642 | NCI_CGAP_Co18 | moderately | colon | | | pCMV- |
| | | differentiated | | | | SPORT6 |
| | | adenocarcinoma | | | | |
| L0643 | NCI_CGAP_Co19 | moderately | colon | | | pCMV- |
| | | differentiated | | | | SPORT6 |
| | | adenocarcinoma | | | | |
| L0644 | NCI_CGAP_Co20 | moderately | colon | | | pCMV- |
| | | differentiated | | | | SPORT6 |
| | | adenocarcinoma | | | | |
| L0645 | NCI_CGAP_Co21 | moderately | colon | | | pCMV- |
| | | differentiated | | | | SPORT6 |
| | | adenocarcinoma | | | | |
| L0646 | NCI_CGAP_Co14 | moderately- | colon | | | pCMV- |
| | | differentiated | | | | SPORT6 |
| | | adenocarcinoma | | | | |
| L0647 | NCI_CGAP_Sar4 | five pooled | connective | | | pCMV- |
| | | sarcomas, including | tissue | | | SPORT6 |
| | | myxoid liposarcoma | | | | |
| L0648 | NCI_CGAP_Eso2 | squamous cell | esophagus | | | pCMV- |
| | | carcinoma | | | | SPORT6 |
| L0649 | NCI_CGAP_GU1 | 2 pooled high-grade | genitourinary | | | pCMV- |
| | | transitional cell | tract | | | SPORT6 |
| | | tumors | | | | |
| L0650 | NCI_CGAP_Kid13 | 2 pooled Wilms″ | kidney | | | pCMV- |
| | | tumors, one primary | | | | SPORT6 |
| | | and one metast | | | | |
| L0651 | NCI_CGAP_Kid8 | renal cell tumor | kidney | | | pCMV- |
| | | | | | | SPORT6 |
| L0653 | NCI_CGAP_Lu28 | two pooled | lung | | | pCMV- |
| | | squamous cell | | | | SPORT6 |
| | | carcinomas | | | | |
| L0654 | NCI_CGAP_Lu31 | | lung, cell line | | | pCMV- |
| | | | | | | SPORT6 |
| L0655 | NCI_CGAP_Lym12 | lymphoma, | lymph node | | | pCMV- |
| | | follicular mixed | | | | SPORT6 |
| | | small and large cell | | | | |
| L0656 | NCI_CGAP_Ov38 | normal epithelium | ovary | | | pCMV- |
| | | | | | | SPORT6 |
| L0657 | NCI_CGAP_Ov23 | tumor, 5 pooled (see | ovary | | | pCMV- |
| | | description) | | | | SPORT6 |
| L0658 | NCI_CGAP_Ov35 | tumor, 5 pooled (see | ovary | | | pCMV- |
| | | description) | | | | SPORT6 |
| L0659 | NCI_CGAP_Pan1 | adenocarcinoma | pancreas | | | pCMV- |
| | | | | | | SPORT6 |
| L0661 | NCI_CGAP_Me115 | malignant | skin | | | pCMV- |
| | | melanoma, | | | | SPORT6 |
| | | metastatic to lymph | | | | |
| | | node | | | | |
| L0662 | NCI_CGAP_Gas4 | poorly differentiated | stomach | | | pCMV- |
| | | adenocarcinoma | | | | SPORT6 |
| | | with signet r | | | | |
| L0663 | NCI_CGAP_Ut2 | moderately- | uterus | | | pCMV- |
| | | differentiated | | | | SPORT6 |
| | | endometrial | | | | |
| | | adenocarcino | | | | |
| L0664 | NCI_CGAP_Ut3 | poorly-differentiated | uterus | | | pCMV- |
| | | endometrial | | | | SPORT6 |
| | | adenocarcinoma, | | | | |
| L0665 | NCI_CGAP_Ut4 | serous papillary | uterus | | | pCMV- |
| | | carcinoma, high | | | | SPORT6 |
| | | grade, 2 pooled t | | | | |
| L0666 | NCI_CGAP_Ut1 | well-differentiated | uterus | | | pCMV- |
| | | endometrial | | | | SPORT6 |
| | | adenocarcinoma, 7 | | | | |
| L0667 | NCI_CGAP_CML1 | myeloid cells, 18 | whole blood | | | pCMV- |
| | | pooled CML cases, | | | | SPORT6 |
| | | BCR/ABL rearra | | | | |
| L0697 | Testis 1 | | | | | PGEM |
| | | | | | | 5zf(+) |
| L0717 | Gessler Wilms tumor | | | | | pSPORT1 |
| L0731 | Soares_pregnant_uterus_{—} | | uterus | | | pT7T3-Pac |
| | NbHPU | | | | | |
| L0738 | Human colorectal cancer | | | | | pT7T3D |
| L0740 | Soares melanocyte | melanocyte | | | | pT7T3D |
| | 2NbHM | | | | | (Pharmacia) |
| | | | | | | with a |
| | | | | | | modified |
| | | | | | | polylinker |
| L0741 | Soares adult brain | | brain | | | pT7T3D |
| | N2b4HB55Y | | | | | (Pharmacia) |
| | | | | | | with a |
| | | | | | | modified |
| | | | | | | polylinker |
| L0742 | Soares adult brain | brain | | | | pT7T3D |
| | N2b5HB55Y | | | | | (Pharmacia) |
| | | | | | | with a |
| | | | | | | modified |
| | | | | | | polylinker |
| L0743 | Soares breast 2NbHBst | | breast | | | pT7T3D |
| | | | | | | (Pharmacia) |
| | | | | | | with a |
| | | | | | | modified |
| | | | | | | polylinker |
| L0744 | Soares breast 3NbHBst | | breast | | | pT7T3D |
| | | | | | | (Pharmacia) |
| | | | | | | with a |
| | | | | | | modified |
| | | | | | | polylinker |
| L0745 | Soares retina N2b4HR | retina | eye | | | pT7T3D |
| | | | | | | (Pharmacia) |
| | | | | | | with a |
| | | | | | | modified |
| | | | | | | polylinker |
| L0746 | Soares retina N2b5HR | retina | eye | | | pT7T3D |
| | | | | | | (Pharmacia) |
| | | | | | | with a |
| | | | | | | modified |
| | | | | | | polylinker |
| L0747 | Soares_fetal_heart_{—} | | heart | | | pT7T3D |
| | NbHH19W | | | | | (Pharmacia) |
| | | | | | | with a |
| | | | | | | modified |
| | | | | | | polylinker |
| L0748 | Soares fetal liver spleen | | Liver and | | | pT7T3D |
| | 1NFLS | | Spleen | | | (Pharmacia) |
| | | | | | | with a |
| | | | | | | modified |
| | | | | | | polylinker |
| L0749 | Soares_fetal_liver_spleen_{—} | | Liver and | | | pT7T3D |
| | 1NFLS_S1 | | Spleen | | | (Pharmacia) |
| | | | | | | with a |
| | | | | | | modified |
| | | | | | | polylinker |
| L0750 | Soares_fetal_lung_{—} | | lung | | | pT7T3D |
| | NbHL19W | | | | | (Pharmacia) |
| | | | | | | with a |
| | | | | | | modified |
| | | | | | | polylinker |
| L0751 | Soares ovary tumor | ovarian tumor | ovary | | | pT7T3D |
| | NbHOT | | | | | (Pharmacia) |
| | | | | | | with a |
| | | | | | | modified |
| | | | | | | polylinker |
| L0752 | Soares_parathyroid_tumor_{—} | parathyroid tumor | parathyroid | | | pT7T3D |
| | NbHPA | | gland | | | (Pharmacia) |
| | | | | | | with a |
| | | | | | | modified |
| | | | | | | polylinker |
| L0753 | Soares_pineal_gland_{—} | | pineal gland | | | pT7T3D |
| | N3HPG | | | | | (Pharmacia) |
| | | | | | | with a |
| | | | | | | modified |
| | | | | | | polylinker |
| L0754 | Soares placenta Nb2HP | | placenta | | | pT7T3D |
| | | | | | | (Pharmacia) |
| | | | | | | with a |
| | | | | | | modified |
| | | | | | | polylinker |
| L0755 | Soares_placenta_8to9 | | placenta | | | pT7T3D |
| | weeks_2NbHP8to9W | | | | | (Pharmacia) |
| | | | | | | with a |
| | | | | | | modified |
| | | | | | | polylinker |
| L0756 | Soares_multiple_sclerosis_{—} | multiple sclerosis | | | | pT7T3D |
| | 2NbHMSP | lesions | | | | (Pharmacia) |
| | | | | | | with a |
| | | | | | | modified |
| | | | | | | polylinker |
| | | | | | | V_TYPE |
| L0757 | Soares_senescent_{—} | senescent fibroblast | | | | pT7T3D |
| | fibroblasts_NbHSF | | | | | (Pharmacia) |
| | | | | | | with a |
| | | | | | | modified |
| | | | | | | polylinker |
| | | | | | | V_TYPE |
| L0758 | Soares_testis_NHT | | | | | pT7T3D-Pac |
| | | | | | | (Pharmacia) |
| | | | | | | with a |
| | | | | | | modified |
| | | | | | | polylinker |
| L0759 | Soares_total_fetus_{—} | | | | | pT7T3D-Pac |
| | Nb2HF8_9w | | | | | (Pharmacia) |
| | | | | | | with a |
| | | | | | | modified |
| | | | | | | polylinker |
| L0761 | NCI_CGAP_CLL1 | B-cell, chronic | | | | pT7T3D-Pac |
| | | lymphotic leukemia | | | | (Pharmacia) |
| | | | | | | with a |
| | | | | | | modified |
| | | | | | | polylinker |
| L0762 | NCI_CGAP_Br1.1 | breast | | | | pT7T3D-Pac |
| | | | | | | (Pharmacia) |
| | | | | | | with a |
| | | | | | | modified |
| | | | | | | polylinker |
| L0763 | NCI_CGAP_Br2 | breast | | | | pT7T3D-Pac |
| | | | | | | (Pharmacia) |
| | | | | | | with a |
| | | | | | | modified |
| | | | | | | polylinker |
| L0764 | NCI_CGAP_Co3 | colon | | | | pT7T3D-Pac |
| | | | | | | (Pharmacia) |
| | | | | | | with a |
| | | | | | | modified |
| | | | | | | polylinker |
| L0766 | NCI_CGAP_GCB1 | germinal center B | | | | pT7T3D-Pac |
| | | cell | | | | (Pharmacia) |
| | | | | | | with a |
| | | | | | | modified |
| | | | | | | polylinker |
| L0767 | NCI_CGAP_GC3 | pooled germ cell | | | | pT7T3D-Pac |
| | | tumors | | | | (Pharmacia) |
| | | | | | | with a |
| | | | | | | modified |
| | | | | | | polylinker |
| L0768 | NCI_CGAP_GC4 | pooled germ cell | | | | pT7T3D-Pac |
| | | tumors | | | | (Pharmacia) |
| | | | | | | with a |
| | | | | | | modified |
| | | | | | | polylinker |
| L0769 | NCI_CGAP_Brn25 | anaplastic | brain | | | pT7T3D-Pac |
| | | oligodendroglioma | | | | (Pharmacia) |
| | | | | | | with a |
| | | | | | | modified |
| | | | | | | polylinker |
| L0770 | NCI_CGAP_Brn23 | glioblastoma | brain | | | pT7T3D-Pac |
| | | (pooled) | | | | (Pharmacia) |
| | | | | | | with a |
| | | | | | | modified |
| | | | | | | polylinker |
| L0771 | NCI_CGAP_Co8 | adenocarcinoma | colon | | | pT7T3D-Pac |
| | | | | | | (Pharmacia) |
| | | | | | | with a |
| | | | | | | modified |
| | | | | | | polylinker |
| L0772 | NCI_CGAP_Co10 | colon tumor RER+ | colon | | | pT7T3D-Pac |
| | | | | | | (Pharmacia) |
| | | | | | | with a |
| | | | | | | modified |
| | | | | | | polylinker |
| L0773 | NCI_CGAP_Co9 | colon tumor RER+ | colon | | | pT7T3D-Pac |
| | | | | | | (Pharmacia) |
| | | | | | | with a |
| | | | | | | modified |
| | | | | | | polylinker |
| L0774 | NCI_CGAP_Kid3 | | kidney | | | pT7T3D-Pac |
| | | | | | | (Pharmacia) |
| | | | | | | with a |
| | | | | | | modified |
| | | | | | | polylinker |
| L0775 | NCI_CGAP_Kid5 | 2pooled tumors | kidney | | | pT7T3D-Pac |
| | | (clear cell type) | | | | (Pharmacia) |
| | | | | | | with a |
| | | | | | | modified |
| | | | | | | polylinker |
| L0776 | NCI_CGAP_Lu5 | carcinoid | lung | | | pT7T3D-Pac |
| | | | | | | (Pharmacia) |
| | | | | | | with a |
| | | | | | | modified |
| | | | | | | polylinker |
| L0777 | Soares_NhHMPu_S1 | Pooled human | mixed (see | | | pT7T3D-Pac |
| | | melanocyte, fetal | below) | | | (Pharmacia) |
| | | heart, and pregnant | | | | with a |
| | | | | | | modified |
| | | | | | | polylinker |
| L0778 | Barstead pancreas | | pancreas | | | pT7T3D-Pac |
| | HPLRB1 | | | | | (Pharmacia) |
| | | | | | | with a |
| | | | | | | modified |
| | | | | | | polylinker |
| L0779 | Soares_NFL_T_GBC_S1 | pooled | | | | pT7T3D-Pac |
| | | | | | | (Pharmacia) |
| | | | | | | with a |
| | | | | | | modified |
| | | | | | | polylinker |
| L0780 | Soares_NSF_FS_9W_OT_{—} | | pooled | | | pT7T3D-Pac |
| | PA_P_S1 | | | | | (Pharmacia) |
| | | | | | | with a |
| | | | | | | modified |
| | | | | | | polylinker |
| L0782 | NCI_CGAP_Pr21 | normal prostate | prostate | | | pT7T3D-PaC |
| | | | | | | (Pharmacia) |
| | | | | | | with a |
| | | | | | | modified |
| | | | | | | polylinker |
| L0783 | NCI_CGAP_Pr22 | normal prostate | prostate | | | pT7T3D-Pac |
| | | | | | | (Pharmacia) |
| | | | | | | with a |
| | | | | | | modified |
| | | | | | | polylinker |
| L0785 | Barstead spleen HPLRB2 | | spleen | | | pT7T3D-Pac |
| | | | | | | (Pharmacia) |
| | | | | | | with a |
| | | | | | | modified |
| | | | | | | polylinker |
| L0786 | Soares_NbHFB | | whole brain | | | pT7T3D-Pac |
| | | | | | | (Pharmacia) |
| | | | | | | with a |
| | | | | | | modified |
| | | | | | | polylinker |
| L0787 | NCI_CGAP_Sub1 | | | | | pT7T3D-Pac |
| | | | | | | (Pharmacia) |
| | | | | | | with a |
| | | | | | | modified |
| | | | | | | polylinker |
| L0788 | NCI_CGAP_Sub2 | | | | | pT7T3D-Pac |
| | | | | | | (Pharmacia) |
| | | | | | | with a |
| | | | | | | modified |
| | | | | | | polylinker |
| L0789 | NC_CGAP_Sub3 | | | | | pT7T3D-Pac |
| | | | | | | (Pharmacia) |
| | | | | | | with a |
| | | | | | | modified |
| | | | | | | polylinker |
| L0790 | NCI_CGAP_Sub4 | | | | | pT7T3D-Pac |
| | | | | | | (Pharmacia) |
| | | | | | | with a |
| | | | | | | modified |
| | | | | | | polylinker |
| L0791 | NCI_CGAP_Sub5 | | | | | pT7T3D-Pac |
| | | | | | | (Pharmacia) |
| | | | | | | with a |
| | | | | | | modified |
| | | | | | | polylinker |
| L0792 | NCI_CGAP_Sub6 | | | | | pT7T3D-Pac |
| | | | | | | (Pharmacia) |
| | | | | | | with a |
| | | | | | | modified |
| | | | | | | polylinker |
| L0793 | NCI_CGAP_Sub7 | | | | | pT7T3D-Pac |
| | | | | | | (Pharmacia) |
| | | | | | | with a |
| | | | | | | modified |
| | | | | | | polylinker |
| L0794 | NCI_CGAP_GC6 | pooled germ cell | | | | pT7T3D-Pac |
| | | tumors | | | | (Pharmacia) |
| | | | | | | with a |
| | | | | | | modified |
| | | | | | | polylinker |
| L0796 | NCI_CGAP_Brn50 | medulloblastoma | brain | | | pT7T3D-Pac |
| | | | | | | (Pharmacia) |
| | | | | | | with a |
| | | | | | | modified |
| | | | | | | polylinker |
| L0800 | NCI_CGAP_Co16 | colon tumor, RER+ | colon | | | pT7T3D-Pac |
| | | | | | | (Pharmacia) |
| | | | | | | with a |
| | | | | | | modified |
| | | | | | | polylinker |
| L0803 | NCI_CGAP_Kid11 | | kidney | | | pT7T3D-Pac |
| | | | | | | (Pharmacia) |
| | | | | | | with a |
| | | | | | | modified |
| | | | | | | polylinker |
| L0804 | NCI_CGAP_Kid12 | 2 pooled tumors | kidney | | | pT7T3D-Pac |
| | | (clear cell type) | | | | (Pharmacia) |
| | | | | | | with a |
| | | | | | | modified |
| | | | | | | polylinker |
| L0805 | NCI_CGAP_Lu24 | carcinoid | lung | | | pT7T3D-Pac |
| | | | | | | (Pharmacia) |
| | | | | | | with a |
| | | | | | | modified |
| | | | | | | polylinker |
| L0806 | NCI_CGAP_Lu19 | squamous cell | lung | | | pT7T3D-Pac |
| | | carcinoma, poorly | | | | (Pharmacia) |
| | | differentiated (4 | | | | with a |
| | | | | | | modified |
| | | | | | | polylinker |
| L0807 | NCI_CGAP_Ov18 | fibrotheoma | ovary | | | pT7T3D-Pac |
| | | | | | | (Pharmacia) |
| | | | | | | with a |
| | | | | | | modified |
| | | | | | | polylinker |
| L0808 | Barstead prostate | | prostate | | | pT7T3D-Pac |
| | BPHHPLRB4 1 | | | | | (Pharmacia) |
| | | | | | | with a |
| | | | | | | modified |
| | | | | | | polylinker |
| L0809 | NCI_CGAP_Pr28 | | prostate | | | pT7T3D-Pac |
| | | | | | | (Pharmacia) |
| | | | | | | with a |
| | | | | | | modified |
| | | | | | | polylinker |
| L2251 | Human fetal lung | Fetal lung | | | | |

[0090] TABLE 5

| OMIM | |
|---|---|
| Refer- | |
| ence | Description |
| 104770 | Amyloidosis, secondary, susceptibility to |
| 106165 | Hypertension, essential, 145500 |
| 107670 | Apolipoprotein A-II deficiency |
| 108730 | Brodymyopathy, 601003 |
| 109400 | Basal cell nevus syndrome |
| 110700 | Vivax malaria, susceptibility to |
| 117700 | [Hypoceruloplasminemia, hereditary] |
| 117700 | Hemosiderosis, systemic, due to aceruloplasminemia |
| 125264 | Leukemia, acute nonlymphocytic |
| 126650 | Chloride diarrhea, congenital, Finnish type, 214700 |
| 126650 | Colon cancer |
| 132800 | Basal cell carcinoma |
| 132800 | Epithelioma, self-healing, squamous 1, Ferguson-Smith type |
| 134570 | Factor XIIIA deficiency |
| 135940 | Ichthyosis vulgaris, 146700 |
| 145001 | Hyperparathyroidism-jaw tumor syndrome |
| 146790 | Lupus nephritis, susceptibility to |
| 147781 | Atopy, susceptibility to |
| 150210 | Lactoferrin-deficient neutrophils, 245480 |
| 150240 | Cutis laxa, marfanoid neonatal type |
| 152445 | Vohwinkel syndrome, 124500 |
| 152445 | Erythrokeratoderma, progressive symmetric, 602036 |
| 154276 | Malignant hyperthermia susceptibility 3 |
| 159001 | Muscular dystrophy, limb-girdle, type lB |
| 169600 | Hailey-Hailey disease |
| 172471 | Glycogenosis, hepatic, autosomal |
| 173360 | Thrombophilia due to excessive plasminogen activator inhibitor |
| 173360 | Hemorrhagic diathesis due to PAI1 deficiency |
| 174000 | Medullary cystic kidney disease, AD |
| 179755 | Renal cell carcinoma, papillary, 1 |
| 180105 | Retinitis pigmentosa-l0 |
| 180380 | Night blindness, congenital stationery, rhodopsin-related |
| 180380 | Retinitis pigmentosa, autosomal recessive |
| 180380 | Retinitis pigmentosa-4, autosomal dominant |
| 182860 | Pyropoikilocytosis |
| 182860 | Spherocytosis, recessive |
| 182860 | Elliptocytosis-2 |
| 186580 | Arthrocutaneouveal granulomatosis |
| 186855 | Leukemia-2, T-cell acute lymphoblastic |
| 190000 | Atransferrinemia |
| 191315 | Insensitivity to pain, congenital, with anhidrosis, 256800 |
| 203500 | Alkaptonuria |
| 222800 | Hemolytic anemia due to bisphosphoglycerate mutase deficiency |
| 222900 | Sucrose intolerance |
| 223900 | Dysautonomia, familial |
| 230800 | Gaucher disease |
| 230800 | Gaucher disease with cardiovascular calcification |
| 232050 | Propionicacidemia, type II or pccB type |
| 246900 | Lipoamide dehydrogenase deficiency |
| 253800 | Walker-Warburg syndrome, 236670 |
| 253800 | Fukuyama type congenital muscular dystrophy |
| 264800 | Pseudoxanthoma elasticum |
| 266200 | Anemia, hemolytic, due to PK deficiency |
| 266600 | Inflammatory bowel disease-1 |
| 276902 | Usher syndrome, type 3 |
| 278700 | Xeroderma pigmentosum, group A |
| 278760 | Xeroderma pigmentosum, group F |
| 600511 | Schizophrenia-3 |
| 600760 | Pseudohypoaldosteronism, type I, 264350 |
| 600760 | Liddle syndrome, 177200 |
| 600761 | Pseudohypoaldosteronism, type I, 264350 |
| 600761 | Liddle syndrome, 177200 |
| 600882 | Charcot-Marie-Tooth neuropathy-2B |
| 600897 | Cataract, zonular pulverulent-1, 116200 |
| 601105 | Pycnodysostosis, 265800 |
| 601199 | Neonatal hyperparathyroidism, 239200 |
| 601199 | Hypocalcemia, autosomal dominant, 601198 |
| 601199 | Hypocalciuric hypercalcemia, type I, 145980 |
| 601412 | Deafness, autosomal dominant 7 |
| 601471 | Moebius syndrome-2 |
| 601556 | Spinocerebellar ataxia-1, 164400 |
| 601652 | Glaucoma 1A, primary open angle, juvenile-onset, 137750 |
| 601682 | Glaucoma 1C, primary open angle |
| 602066 | Convulsions, infantile and paroxysmal choreoathetosis |
| 602088 | Nephronophthisis, infantile |
| 602136 | Refsum disease, infantile, 266510 |
| 602136 | Zellweger syndrome-1, 214100 |
| 602136 | Adrenoleukodystrophy, neonatal, 202370 |
| 602447 | Coronary artery disease, susceptibility to |
| 602491 | Hyperlipidemia, familial combined, 1 |

[0091] Polynucleotide and Polypeptide Variants

[0092] The present invention is directed to variants of the polynucleotide sequence disclosed in SEQ ID NO:X or the complementary strand thereto, nucleotide sequences encoding the polypeptide of SEQ ID NO:Y, the nucleotide sequence of SEQ ID NO:X encoding the polypeptide sequence as defined in column 7 of Table 1A, nucleotide sequences encoding the polypeptide as defined in column 7 of Table 1A, the nucleotide sequence as defined in columns 8 and 9 of Table 2, nucleotide sequences encoding the polypeptide encoded by the nucleotide sequence as defined in columns 8 and 9 of Table 2, the nucleotide sequence as defined in column 6 of Table 1B, nucleotide sequences encoding the polypeptide encoded by the nucleotide sequence as defined in column 6 of Table 1B, the cDNA sequence contained in Clone ID NO:Z, and/or nucleotide sequences encoding the polypeptide encoded by the cDNA sequence contained in Clone ID NO:Z.

[0093] The present invention also encompasses variants of the polypeptide sequence disclosed in SEQ ID NO:Y, the polypeptide sequence as defined in column 7 of Table 1A, a polypeptide sequence encoded by the polynucleotide sequence in SEQ ID NO:X, a polypeptide sequence encoded by the nucleotide sequence as defined in columns 8 and 9 of Table 2, a polypeptide sequence encoded by the nucleotide sequence as defined in column 6 of Table 1B, a polypeptide sequence encoded by the complement of the polynucleotide sequence in SEQ ID NO:X, and/or a polypeptide sequence encoded by the cDNA sequence contained in Clone ID NO:Z.

[0094] “Variant” refers to a polynucleotide or polypeptide differing from the polynucleotide or polypeptide of the present invention, but retaining essential properties thereof. Generally, variants are overall closely similar, and, in many regions, identical to the polynucleotide or polypeptide of the present invention.

[0095] Thus, one aspect of the invention provides an isolated nucleic acid molecule comprising, or alternatively consisting of, a polynucleotide having a nucleotide sequence selected from the group consisting of: (a) a nucleotide sequence described in SEQ ID NO:X or contained in the cDNA sequence of Clone ID NO:Z; (b) a nucleotide sequence in SEQ ID NO:X or the cDNA in Clone ID NO:Z which encodes the complete amino acid sequence of SEQ ID NO:Y or the complete amino acid sequence encoded by the cDNA in Clone ID NO:Z; (c) a nucleotide sequence in SEQ ID NO:X or the cDNA in Clone ID NO:Z which encodes a mature polypeptide; (d) a nucleotide sequence in SEQ ID NO:X or the cDNA sequence of Clone ID NO:Z, which encodes a biologically active fragment of a polypeptide; (e) a nucleotide sequence in SEQ ID NO:X or the cDNA sequence of Clone ID NO:Z, which encodes an antigenic fragment of a polypeptide; (f) a nucleotide sequence encoding a polypeptide comprising the complete amino acid sequence of SEQ ID NO:Y or the complete amino acid sequence encoded by the cDNA in Clone ID NO:Z; (g) a nucleotide sequence encoding a mature polypeptide of the amino acid sequence of SEQ ID NO:Y or the amino acid sequence encoded by the cDNA in Clone ID NO:Z; (h) a nucleotide sequence encoding a biologically active fragment of a polypeptide having the complete amino acid sequence of SEQ ID NO:Y or the complete amino acid sequence encoded by the cDNA in Clone ID NO:Z; (i) a nucleotide sequence encoding an antigenic fragment of a polypeptide having the complete amino acid sequence of SEQ ID NO:Y or the complete amino acid sequence encoded by the cDNA in Clone ID NO:Z; and (j) a nucleotide sequence complementary to any of the nucleotide sequences in (a), (b), (c), (d), (e), (f), (g), (h), or (i) above.

[0096] The present invention is also directed to nucleic acid molecules which comprise, or alternatively consist of, a nucleotide sequence which is at least 80%, 85%, 90%, 95%, 96%, 97%, 98%, 99% or 100%, identical to, for example, any of the nucleotide sequences in (a), (b), (c), (d), (e), (f), (g), (h), (i), or (j) above, the nucleotide coding sequence in SEQ ID NO:X or the complementary strand thereto, the nucleotide coding sequence of the cDNA contained in Clone ID NO:Z or the complementary strand thereto, a nucleotide sequence encoding the polypeptide of SEQ ID NO:Y, a nucleotide sequence encoding a polypeptide sequence encoded by the nucleotide sequence in SEQ ID NO:X, a polypeptide sequence encoded by the complement of the polynucleotide sequence in SEQ ID NO:X, a nucleotide sequence encoding the polypeptide encoded by the cDNA contained in Clone ID NO:Z, the nucleotide coding sequence in SEQ ID NO:X as defined in columns 8 and 9 of Table 2 or the complementary strand thereto, a nucleotide sequence encoding the polypeptide encoded by the nucleotide sequence in SEQ ID NO:X as defined in columns 8 and 9 of Table 2 or the complementary strand thereto, the nucleotide coding sequence in SEQ ID NO:B as defined in column 6 of Table 1B or the complementary strand thereto, a nucleotide sequence encoding the polypeptide encoded by the nucleotide sequence in SEQ ID NO:B as defined in column 6 of Table 1B or the complementary strand thereto, the nucleotide sequence in SEQ ID NO:X encoding the polypeptide sequence as defined in column 7 of Table 1 A or the complementary strand thereto, nucleotide sequences encoding the polypeptide as defined in column 7 of Table 1A or the complementary strand thereto, and/or polynucleotide fragments of any of these nucleic acid molecules (e.g., those fragments described herein). Polynucleotides which hybridize to the complement of these nucleic acid molecules under stringent hybridization conditions or alternatively, under lower stringency conditions, are also encompassed by the invention, as are polypeptides encoded by these polynucleotides and nucleic acids.

[0097] In a preferred embodiment, the invention encompasses nucleic acid molecules which comprise, or alternatively, consist of a polynucleotide which hybridizes under stringent hybridization conditions, or alternatively, under lower stringency conditions, to a polynucleotide in (a), (b), (c), (d), (e), (f), (g), (h), or (i), above, as are polypeptides encoded by these polynucleotides. In another preferred embodiment, polynucleotides which hybridize to the complement of these nucleic acid molecules under stringent hybridization conditions, or alternatively, under lower stringency conditions, are also encompassed by the invention, as are polypeptides encoded by these polynucleotides.

[0098] In another embodiment, the invention provides a purified protein comprising, or alternatively consisting of, a polypeptide having an amino acid sequence selected from the group consisting of: (a) the complete amino acid sequence of SEQ ID NO:Y or the complete amino acid sequence encoded by the cDNA in Clone ID NO:Z; (b) the amino acid sequence of a mature form of a polypeptide having the amino acid sequence of SEQ ID NO:Y or the amino acid sequence encoded by the cDNA in Clone ID NO:Z; (c) the amino acid sequence of a biologically active fragment of a polypeptide having the complete amino acid sequence of SEQ ID NO:Y or the complete amino acid sequence encoded by the cDNA in Clone ID NO:Z; and (d) the amino acid sequence of an antigenic fragment of a polypeptide having the complete amino acid sequence of SEQ ID NO:Y or the complete amino acid sequence encoded by the cDNA in Clone ID NO:Z.

[0099] The present invention is also directed to proteins which comprise, or alternatively consist of, an amino acid sequence which is at least 80%, 85%, 90%, 95%, 96%, 97%, 98%, 99% or 100%, identical to, for example, any of the amino acid sequences in (a), (b), (c), or (d), above, the amino acid sequence shown in SEQ ID NO:Y, the amino acid sequence encoded by the cDNA contained in Clone ID NO:Z, the amino acid sequence of the polypeptide encoded by the nucleotide sequence in SEQ ID NO:X as defined in columns 8 and 9 of Table 2, the amino acid sequence of the polypeptide encoded by the nucleotide sequence in SEQ ID NO:B as defined in column 6 of Table 1B, the amino acid sequence as defined in column 7 of Table 1A, an amino acid sequence encoded by the nucleotide sequence in SEQ ID NO:X, and an amino acid sequence encoded by the complement of the polynucleotide sequence in SEQ ID NO:X. Fragments of these polypeptides are also provided (e.g., those fragments described herein). Further proteins encoded by polynucleotides which hybridize to the complement of the nucleic acid molecules encoding these amino acid sequences under stringent hybridization conditions or alternatively, under lower stringency conditions, are also encompassed by the invention, as are the polynucleotides encoding these proteins.

[0100] By a nucleic acid having a nucleotide sequence at least, for example, 95% “identical” to a reference nucleotide sequence of the present invention, it is intended that the nucleotide sequence of the nucleic acid is identical to the reference sequence except that the nucleotide sequence may include up to five point mutations per each 100 nucleotides of the reference nucleotide sequence encoding the polypeptide. In other words, to obtain a nucleic acid having a nucleotide sequence at least 95% identical to a reference nucleotide sequence, up to 5% of the nucleotides in the reference sequence may be deleted or substituted with another nucleotide, or a number of nucleotides up to 5% of the total nucleotides in the reference sequence may be inserted into the reference sequence. The query sequence may be an entire sequence referred to in Table 1A or 2 as the ORF (open reading frame), or any fragment specified as described herein.

[0101] As a practical matter, whether any particular nucleic acid molecule or polypeptide is at least 80%, 85%, 90%, 95%, 96%, 97%, 98% or 99% identical to a nucleotide sequence of the present invention can be determined conventionally using known computer programs. A preferred method for determining the best overall match between a query sequence (a sequence of the present invention) and a subject sequence, also referred to as a global sequence alignment, can be determined using the FASTDB computer program based on the algorithm of Brutlag et al. (Comp. App. Biosci. 6:237-245 (1990)). In a sequence alignment the query and subject sequences are both DNA sequences. An RNA sequence can be compared by converting U's to T's. The result of said global sequence alignment is expressed as percent identity. Preferred parameters used in a FASTDB alignment of DNA sequences to calculate percent identity are: Matrix=Unitary, k-tuple=4, Mismatch Penalty=1, Joining Penalty=30, Randomization Group Length=0, Cutoff Score=1, Gap Penalty=5, Gap Size Penalty 0.05, Window Size=500 or the length of the subject nucleotide sequence, whichever is shorter.

[0102] If the subject sequence is shorter than the query sequence because of 5′ or 3′ deletions, not because of internal deletions, a manual correction must be made to the results. This is because the FASTDB program does not account for 5′ and 3′ truncations of the subject sequence when calculating percent identity. For subject sequences truncated at the 5′ or 3′ ends, relative to the query sequence, the percent identity is corrected by calculating the number of bases of the query sequence that are 5′ and 3′ of the subject sequence, which are not matched/aligned, as a percent of the total bases of the query sequence. Whether a nucleotide is matched/aligned is determined by results of the FASTDB sequence alignment. This percentage is then subtracted from the percent identity, calculated by the above FASTDB program using the specified parameters, to arrive at a final percent identity score. This corrected score is what is used for the purposes of the present invention. Only bases outside the 5′ and 3′ bases of the subject sequence, as displayed by the FASTDB alignment, which are not matched/aligned with the query sequence, are calculated for the purposes of manually adjusting the percent identity score.

[0103] For example, a 90 base subject sequence is aligned to a 100 base query sequence to determine percent identity. The deletions occur at the 5′ end of the subject sequence and therefore, the FASTDB alignment does not show a matched/alignment of the first 10 bases at 5′ end. The 10 unpaired bases represent 10% of the sequence (number of bases at the 5′ and 3′ ends not matched/total number of bases in the query sequence) so 10% is subtracted from the percent identity score calculated by the FASTDB program. If the remaining 90 bases were perfectly matched the final percent identity would be 90%. In another example, a 90 base subject sequence is compared with a 100 base query sequence. This time the deletions are internal deletions so that there are no bases on the 5′ or 3′ of the subject sequence which are not matched/aligned with the query. In this case the percent identity calculated by FASTDB is not manually corrected. Once again, only bases 5′ and 3′ of the subject sequence which are not matched/aligned with the query sequence are manually corrected for. No other manual corrections are to be made for the purposes of the present invention.

[0104] By a polypeptide having an amino acid sequence at least, for example, 95% “identical” to a query amino acid sequence of the present invention, it is intended that the amino acid sequence of the subject polypeptide is identical to the query sequence except that the subject polypeptide sequence may include up to five amino acid alterations per each 100 amino acids of the query amino acid sequence. In other words, to obtain a polypeptide having an amino acid sequence at least 95% identical to a query amino acid sequence, up to 5% of the amino acid residues in the subject sequence may be inserted, deleted, (indels) or substituted with another amino acid. These alterations of the reference sequence may occur at the amino or carboxy terminal positions of the reference amino acid sequence or anywhere between those terminal positions, interspersed either individually among residues in the reference sequence or in one or more contiguous groups within the reference sequence.

[0105] As a practical matter, whether any particular polypeptide is at least 80%, 85%, 90%, 95%, 96%, 97%, 98% or 99% identical to, for instance, the amino acid sequence of a polypeptide referred to in Table 1A (e.g., the amino acid sequence identified in column 6) or Table 2 (e.g., the amino acid sequence of the polypeptide encoded by the polynucleotide sequence defined in columns 8 and 9 of Table 2) or a fragment thereof, the amino acid sequence of the polypeptide encoded by the polynucleotide sequence in SEQ ID NO:B as defined in column 6 of Table 1B or a fragment thereof, the amino acid sequence of the polypeptide encoded by the nucleotide sequence in SEQ ID NO:X or a fragment thereof, or the amino acid sequence of the polypeptide encoded by cDNA contained in Clone ID NO:Z, or a fragment thereof, can be determined conventionally using known computer programs. A preferred method for determining the best overall match between a query sequence (a sequence of the present invention) and a subject sequence, also referred to as a global sequence alignment, can be determined using the FASTDB computer program based on the algorithm of Brutlag et al. (Comp. App. Biosci.6:237-245 (1990)). In a sequence alignment the query and subject sequences are either both nucleotide sequences or both amino acid sequences. The result of said global sequence alignment is expressed as percent identity. Preferred parameters used in a FASTDB amino acid alignment are: Matrix=PAM 0, k-tuple=2, Mismatch Penalty=1, Joining Penalty=20, Randomization Group Length=0, Cutoff Score=1, Window Size=sequence length, Gap Penalty 5, Gap Size Penalty=0.05, Window Size=500 or the length of the subject amino acid sequence, whichever is shorter.

[0106] If the subject sequence is shorter than the query sequence due to N- or C-terminal deletions, not because of internal deletions, a manual correction must be made to the results. This is because the FASTDB program does not account for N- and C-terminal truncations of the subject sequence when calculating global percent identity. For subject sequences truncated at the N- and C-termini, relative to the query sequence, the percent identity is corrected by calculating the number of residues of the query sequence that are N- and C-terminal of the subject sequence, which are not matched/aligned with a corresponding subject residue, as a percent of the total bases of the query sequence. Whether a residue is matched/aligned is determined by results of the FASTDB sequence alignment. This percentage is then subtracted from the percent identity, calculated by the above FASTDB program using the specified parameters, to arrive at a final percent identity score. This final percent identity score is what is used for the purposes of the present invention. Only residues to the N- and C-termini of the subject sequence, which are not matched/aligned with the query sequence, are considered for the purposes of manually adjusting the percent identity score. That is, only query residue positions outside the farthest N- and C-terminal residues of the subject sequence.

[0107] For example, a 90 amino acid residue subject sequence is aligned with a 100 residue query sequence to determine percent identity. The deletion occurs at the N-terminus of the subject sequence and therefore, the FASTDB alignment does not show a matching/alignment of the first 10 residues at the N-terminus. The 10 unpaired residues represent 10% of the sequence (number of residues at the N- and C-termini not matched/total number of residues in the query sequence) so 10% is subtracted from the percent identity score calculated by the FASTDB program. If the remaining 90 residues were perfectly matched the final percent identity would be 90%. In another example, a 90 residue subject sequence is compared with a 100 residue query sequence. This time the deletions are internal deletions so there are no residues at the N- or C-termini of the subject sequence which are not matched/aligned with the query. In this case the percent identity calculated by FASTDB is not manually corrected. Once again, only residue positions outside the N- and C-terminal ends of the subject sequence, as displayed in the FASTDB alignment, which are not matched/aligned with the query sequnce are manually corrected for. No other manual corrections are to made for the purposes of the present invention.

[0108] The polynucleotide variants of the invention may contain alterations in the coding regions, non-coding regions, or both. Especially preferred are polynucleotide variants containing alterations which produce silent substitutions, additions, or deletions, but do not alter the properties or activities of the encoded polypeptide. Nucleotide variants produced by silent substitutions due to the degeneracy of the genetic code are preferred. Moreover, polypeptide variants in which less than 50, less than 40, less than 30, less than 20, less than 10, or 5-50, 5-25, 5-10, 1-5, or 1-2 amino acids are substituted, deleted, or added in any combination are also preferred. Polynucleotide variants can be produced for a variety of reasons, e.g., to optimize codon expression for a particular host (change codons in the human mRNA to those preferred by a bacterial host such as E. coli).

[0109] Naturally occurring variants are called “allelic variants,” and refer to one of several alternate forms of a gene occupying a given locus on a chromosome of an organism. (Genes II, Lewin, B., ed., John Wiley & Sons, New York (1985)). These allelic variants can vary at either the polynucleotide and/or polypeptide level and are included in the present invention. Alternatively, non-naturally occurring variants may be produced by mutagenesis techniques or by direct synthesis.

[0110] Using known methods of protein engineering and recombinant DNA technology, variants may be generated to improve or alter the characteristics of the polypeptides of the present invention. For instance, one or more amino acids can be deleted from the N-terminus or C-terminus of the polypeptide of the present invention without substantial loss of biological function. As an example, Ron et al. (J. Biol. Chem. 268: 2984-2988 (1993)) reported variant KGF proteins having heparin binding activity even after deleting 3, 8, or 27 amino-terminal amino acid residues. Similarly, Interferon gamma exhibited up to ten times higher activity after deleting 8-10 amino acid residues from the carboxy terminus of this protein. (Dobeli et al., J. Biotechnology 7:199-216 (1988).)

[0111] Moreover, ample evidence demonstrates that variants often retain a biological activity similar to that of the naturally occurring protein. For example, Gayle and coworkers (J. Biol. Chem. 268:22105-22111 (1993)) conducted extensive mutational analysis of human cytokine IL-1a. They used random mutagenesis to generate over 3,500 individual IL-1a mutants that averaged 2.5 amino acid changes per variant over the entire length of the molecule. Multiple mutations were examined at every possible amino acid position. The investigators found that “[m]ost of the molecule could be altered with little effect on either [binding or biological activity].” In fact, only 23 unique amino acid sequences, out of more than 3,500 nucleotide sequences examined, produced a protein that significantly differed in activity from wild-type.

[0112] Furthermore, even if deleting one or more amino acids from the N-terminus or C-terminus of a polypeptide results in modification or loss of one or more biological functions, other biological activities may still be retained. For example, the ability of a deletion variant to induce and/or to bind antibodies which recognize the secreted form will likely be retained when less than the majority of the residues of the secreted form are removed from the N-terminus or C-terminus. Whether a particular polypeptide lacking N- or C-terminal residues of a protein retains such immunogenic activities can readily be determined by routine methods described herein and otherwise known in the art.

[0113] Thus, the invention further includes polypeptide variants which show a functional activity (e.g., biological activity) of the polypeptides of the invention. Such variants include deletions, insertions, inversions, repeats, and substitutions selected according to general rules known in the art so as have little effect on activity.

[0114] The present application is directed to nucleic acid molecules at least 80%, 85%, 90%, 95%, 96%, 97%, 98%, 99% or 100% identical to the nucleic acid sequences disclosed herein, (e.g., encoding a polypeptide having the amino acid sequence of an N and/or C terminal deletion), irrespective of whether they encode a polypeptide having functional activity. This is because even where a particular nucleic acid molecule does not encode a polypeptide having functional activity, one of skill in the art would still know how to use the nucleic acid molecule, for instance, as a hybridization probe or a polymerase chain reaction (PCR) primer. Uses of the nucleic acid molecules of the present invention that do not encode a polypeptide having functional activity include, inter alia, (1) isolating a gene or allelic or splice variants thereof in a cDNA library; (2) in situ hybridization (e.g., “FISH”) to metaphase chromosomal spreads to provide precise chromosomal location of the gene, as described in Verma et al., Human Chromosomes: A Manual of Basic Techniques, Pergamon Press, New York (1988); (3) Northern Blot analysis for detecting mRNA expression in specific tissues (e.g., normal or diseased tissues); and (4) in situ hybridization (e.g., histochemistry) for detecting mRNA expression in specific tissues (e.g., normal or diseased tissues).

[0115] Preferred, however, are nucleic acid molecules having sequences at least 80%, 85%, 90%, 95%, 96%, 97%, 98%, 99% or 100% identical to the nucleic acid sequences disclosed herein, which do, in fact, encode a polypeptide having functional activity. By a polypeptide having “functional activity” is meant, a polypeptide capable of displaying one or more known functional activities associated with a full-length (complete) protein of the invention. Such functional activities include, but are not limited to, biological activity, antigenicity [ability to bind (or compete with a polypeptide of the invention for binding) to an anti-polypeptide of the invention antibody], immunogenicity (ability to generate antibody which binds to a specific polypeptide of the invention), ability to form multimers with polypeptides of the invention, and ability to bind to a receptor or ligand for a polypeptide of the invention.

[0116] The functional activity of the polypeptides, and fragments, variants and derivatives of the invention, can be assayed by various methods.

[0117] For example, in one embodiment where one is assaying for the ability to bind or compete with a full-length polypeptide of the present invention for binding to an anti-polypetide antibody, various immunoassays known in the art can be used, including but not limited to, competitive and non-competitive assay systems using techniques such as radioimmunoassays, ELISA (enzyme linked immunosorbent assay), “sandwich” immunoassays, immunoradiometric assays, gel diffusion precipitation reactions, immunodiffusion assays, in situ immunoassays (using colloidal gold, enzyme or radioisotope labels, for example), western blots, precipitation reactions, agglutination assays (e.g., gel agglutination assays, hemagglutination assays), complement fixation assays, immunofluorescence assays, protein A assays, and immunoelectrophoresis assays, etc. In one embodiment, antibody binding is detected by detecting a label on the primary antibody. In another embodiment, the primary antibody is detected by detecting binding of a secondary antibody or reagent to the primary antibody. In a further embodiment, the secondary antibody is labeled. Many means are known in the art for detecting binding in an immunoassay and are within the scope of the present invention.

[0118] In another embodiment, where a ligand is identified, or the ability of a polypeptide fragment, variant or derivative of the invention to multimerize is being evaluated, binding can be assayed, e.g., by means well-known in the art, such as, for example, reducing and non-reducing gel chromatography, protein affinity chromatography, and affinity blotting. See generally, Phizicky et al., Microbiol. Rev. 59:94-123 (1995). In another embodiment, the ability of physiological correlates of a polypeptide of the present invention to bind to a substrate(s) of the polypeptide of the invention can be routinely assayed using techniques known in the art.

[0119] In addition, assays described herein (see Examples) and otherwise known in the art may routinely be applied to measure the ability of polypeptides of the present invention and fragments, variants and derivatives thereof to elicit polypeptide related biological activity (either in vitro or in vivo). Other methods will be known to the skilled artisan and are within the scope of the invention.

[0120] Of course, due to the degeneracy of the genetic code, one of ordinary skill in the art will immediately recognize that a large number of the nucleic acid molecules having a sequence at least 80%, 85%, 90%, 95%, 96%, 97%, 98%, 99%, or 100% identical to, for example, the nucleic acid sequence of the cDNA contained in Clone ID NO:Z, the nucleic acid sequence referred to in Table 1A (SEQ ID NO:X), the nucleic acid sequence disclosed in Table 2 (e.g,. the nucleic acid sequence delineated in columns 8 and 9) or fragments thereof, will encode polypeptides “having functional activity.” In fact, since degenerate variants of any of these nucleotide sequences all encode the same polypeptide, in many instances, this will be clear to the skilled artisan even without performing the above described comparison assay. It will be further recognized in the art that, for such nucleic acid molecules that are not degenerate variants, a reasonable number will also encode a polypeptide having functional activity. This is because the skilled artisan is fully aware of amino acid substitutions that are either less likely or not likely to significantly effect protein function (e.g., replacing one aliphatic amino acid with a second aliphatic amino acid), as further described below.

[0121] For example, guidance concerning how to make phenotypically silent amino acid substitutions is provided in Bowie et al., “Deciphering the Message in Protein Sequences: Tolerance to Amino Acid Substitutions,” Science 247:1306-1310 (1990), wherein the authors indicate that there are two main strategies for studying the tolerance of an amino acid sequence to change.

[0122] The first strategy exploits the tolerance of amino acid substitutions by natural selection during the process of evolution. By comparing amino acid sequences in different species, conserved amino acids can be identified. These conserved amino acids are likely important for protein function. In contrast, the amino acid positions where substitutions have been tolerated by natural selection indicates that these positions are not critical for protein function. Thus, positions tolerating amino acid substitution could be modified while still maintaining biological activity of the protein.

[0123] The second strategy uses genetic engineering to introduce amino acid changes at specific positions of a cloned gene to identify regions critical for protein function. For example, site directed mutagenesis or alanine-scanning mutagenesis (introduction of single alanine mutations at every residue in the molecule) can be used. See Cunningham and Wells, Science 244:1081-1085 (1989). The resulting mutant molecules can then be tested for biological activity.

[0124] As the authors state, these two strategies have revealed that proteins are surprisingly tolerant of amino acid substitutions. The authors further indicate which amino acid changes are likely to be permissive at certain amino acid positions in the protein. For example, most buried (within the tertiary structure of the protein) amino acid residues require nonpolar side chains, whereas few features of surface side chains are generally conserved. Moreover, tolerated conservative amino acid substitutions involve replacement of the aliphatic or hydrophobic amino acids Ala, Val, Leu and Ile; replacement of the hydroxyl residues Ser and Thr; replacement of the acidic residues Asp and Glu; replacement of the amide residues Asn and Gln, replacement of the basic residues Lys, Arg, and His; replacement of the aromatic residues Phe, Tyr, and Trp, and replacement of the small-sized amino acids Ala, Ser, Thr, Met, and Gly. Besides conservative amino acid substitution, variants of the present invention include (i) substitutions with one or more of the non-conserved amino acid residues, where the substituted amino acid residues may or may not be one encoded by the genetic code, or (ii) substitutions with one or more of the amino acid residues having a substituent group, or (iii) fusion of the mature polypeptide with another compound, such as a compound to increase the stability and/or solubility of the polypeptide (for example, polyethylene glycol), (iv) fusion of the polypeptide with additional amino acids, such as, for example, an IgG Fc fusion region peptide, serum albumin (preferably human serum albumin) or a fragment thereof, or leader or secretory sequence, or a sequence facilitating purification, or (v) fusion of the polypeptide with another compound, such as albumin (including but not limited to recombinant albumin (see, e.g., U.S. Pat. No. 5,876,969, issued Mar. 2, 1999, EP Patent 0 413 622, and U.S. Pat. No. 5,766,883, issued Jun. 16, 1998, herein incorporated by reference in their entirety)). Such variant polypeptides are deemed to be within the scope of those skilled in the art from the teachings herein.

[0125] For example, polypeptide variants containing amino acid substitutions of charged amino acids with other charged or neutral amino acids may produce proteins with improved characteristics, such as less aggregation. Aggregation of pharmaceutical formulations both reduces activity and increases clearance due to the aggregate's immunogenic activity. See Pinckard et al., Clin. Exp. Immunol. 2:331-340 (1967); Robbins et al., Diabetes 36: 838-845 (1987); Cleland et al., Crit. Rev. Therapeutic Drug Carrier Systems 10:307-377 (1993).

[0126] A further embodiment of the invention relates to polypeptides which comprise the amino acid sequence of a polypeptide having an amino acid sequence which contains at least one amino acid substitution, but not more than 50 amino acid substitutions, even more preferably, not more than 40 amino acid substitutions, still more preferably, not more than 30 amino acid substitutions, and still even more preferably, not more than 20 amino acid substitutions from a polypeptide sequence disclosed herein. Of course it is highly preferable for a polypeptide to have an amino acid sequence which comprises the amino acid sequence of a polypeptide of SEQ ID NO:Y, an amino acid sequence encoded by SEQ ID NO:X, an amino acid sequence encoded by the portion of SEQ ID NO:X as defined in columns 8 and 9 of Table 2, an amino acid sequence encoded by the complement of SEQ ID NO:X, and/or an amino acid sequence encoded by cDNA contained in Clone ID NO:Z which contains, in order of ever-increasing preference, at least one, but not more than 10, 9, 8, 7, 6, 5, 4, 3, 2 or 1 amino acid substitutions.

[0127] In specific embodiments, the polypeptides of the invention comprise, or alternatively, consist of, fragments or variants of a reference amino acid sequence selected from: (a) the amino acid sequence of SEQ ID NO:Y or fragments thereof (e.g., the mature form and/or other fragments described herein); (b) the amino acid sequence encoded by SEQ ID NO:X or fragments thereof; (c) the amino acid sequence encoded by the complement of SEQ ID NO:X or fragments thereof; (d) the amino acid sequence encoded by the portion of SEQ ID NO:X as defined in columns 8 and 9 of Table 2 or fragments thereof; and (e) the amino acid sequence encoded by cDNA contained in Clone ID NO:Z or fragments thereof; wherein the fragments or variants have 1-5,5-10, 5-25, 5-50, 10-50 or 50-150, amino acid residue additions, substitutions, and/or deletions when compared to the reference amino acid sequence. In preferred embodiments, the amino acid substitutions are conservative. Polynucleotides encoding these polypeptides are also encompassed by the invention.

[0128] Polynucleotide and Polypeptide Fragments

[0129] The present invention is also directed to polynucleotide fragments of the polynucleotides (nucleic acids) of the invention. In the present invention, a “polynucleotide fragment” refers to a polynucleotide having a nucleic acid sequence which, for example: is a portion of the cDNA contained in Clone ID NO:Z or the complementary strand thereto; is a portion of the polynucleotide sequence encoding the polypeptide encoded by the cDNA contained in Clone ID NO:Z or the complementary strand thereto; is a portion of a polynucleotide sequence encoding the amino acid sequence encoded by the region of SEQ ID NO:X as defined in columns 8 and 9 of Table 2 or the complementary strand thereto; is a portion of the polynucleotide sequence of SEQ ID NO:X as defined in columns 8 and 9 of Table 2 or the complementary strand thereto; is a portion of the polynucleotide sequence in SEQ ID NO:X or the complementary strand thereto; is a polynucleotide sequence encoding a portion of the polypeptide of SEQ ID NO:Y; is a polynucleotide sequence encoding a portion of a polypeptide encoded by SEQ ID NO:X; is a polynucleotide sequence encoding a portion of a polypeptide encoded by the complement of the polynucleotide sequence in SEQ ID NO:X; is a portion of a polynucleotide sequence encoding the amino acid sequence encoded by the region of SEQ ID NO:B as defined in column 6 of Table 1B or the complementary strand thereto; or is a portion of the polynucleotide sequence of SEQ ID NO:B as defined in column 6 of Table 1B or the complementary strand thereto.

[0130] The polynucleotide fragments of the invention are preferably at least about 15 nt, and more preferably at least about 20 nt, still more preferably at least about 30 nt, and even more preferably, at least about 40 nt, at least about 50 nt, at least about 75 nt, or at least about 150 nt in length. A fragment “at least 20 nt in length,” for example, is intended to include 20 or more contiguous bases from the cDNA sequence contained in Clone ID NO:Z, or the nucleotide sequence shown in SEQ ID NO:X or the complementary stand thereto. In this context “about” includes the particularly recited value or a value larger or smaller by several (5, 4, 3, 2, or 1) nucleotides, at either terminus or at both termini. These nucleotide fragments have uses that include, but are not limited to, as diagnostic probes and primers as discussed herein. Of course, larger fragments (e.g., at least 160, 170, 180, 190, 200, 250, 500, 600, 1000, or 2000 nucleotides in length) are also encompassed by the invention.

[0131] Moreover, representative examples of polynucleotide fragments of the invention comprise, or alternatively consist of, a sequence from about nucleotide number 1-50, 51-100, 101-150, 151-200, 201-250, 251-300, 301-350, 351-400, 401-450, 451-500, 501-550, 551-600, 601-650, 651-700, 701-750, 751-800, 801-850, 851-900, 901-950, 951-1000, 1001-1050, 1051-1100, 1101-1150, 1151-1200, 1201-1250, 1251-1300, 1301-1350, 1351-1400, 1401-1450, 1451-1500, 1501-1550, 1551-1600, 1601-1650, 1651-1700, 1701-1750, 1751-1800, 1801-1850, 1851-1900, 1901-1950, 1951-2000, 2001-2050, 2051-2100, 2101-2150, 2151-2200, 2201-2250, 2251-2300, 2301-2350, 2351-2400, 2401-2450, 2451-2500, 2501-2550, 2551-2600, 2601-2650, 2651-2700, 2701-2750, 2751-2800, 2801-2850, 2851-2900, 2901-2950, 2951-3000, 3001-3050, 3051-3100, 3101-3150, 3151-3200, 3201-3250, 3251-3300, 3301-3350, 3351-3400, 3401-3450, 3451-3500, 3501-3550, 3551-3600, 3601-3650, 3651-3700, 3701-3750, 3751-3800, 3801-3850, 3851-3900, 3901-3950, 3951-4000, 4001-4050, 4051-4100, 4101-4150, 4151-4200, 4201-4250, 4251-4300, 4301-4350, 4351-4400, 4401-4450, 4451-4500, 4501-4550, 4551-4600, 4601-4650, 4651-4700, 4701-4750, 4751-4800, 4801-4850, 4851-4900, 4901-4950, 4951-5000, 5001-5050, 5051-5100, 5101-5150, 5151-5200, 5201-5250, 5251-5300, 5301-5350, 5351-5400, 5401-5450, 5451-5500, 5501-5550, 5551-5600, 5601-5650, 5651-5700, 5701-5750, 5751-5800, 5801-5850, 5851-5900, 5901-5950, 5951-6000, 6001-6050, 6051-6100, 6101-6150, 6151-6200, 6201-6250, 6251-6300, 6301-6350, 6351-6400, 6401-6450, 6451-6500, 6501-6550, 6551-6600, 6601-6650, 6651-6700, 6701-6750, 6751-6800, 6801-6850, 6851-6900, 6901-6950, 6951-7000, 7001-7050, 7051-7100, 7101-7150, 7151-7200, 7201-7250, 7251-7300 or 7301 to the end of SEQ ID NO:X, or the complementary strand thereto. In this context “about” includes the particularly recited range or a range larger or smaller by several (5, 4, 3, 2, or 1) nucleotides, at either terminus or at both termini. Preferably, these fragments encode a polypeptide which has a functional activity (e.g., biological activity). More preferably, these polynucleotides can be used as probes or primers as discussed herein. Polynucleotides which hybridize to one or more of these polynucleotides under stringent hybridization conditions or alternatively, under lower stringency conditions are also encompassed by the invention, as are polypeptides encoded by these polynucleotides.

[0132] Further representative examples of polynucleotide fragments of the invention comprise, or alternatively consist of, a sequence from about nucleotide number 1-50, 51-100, 101-150, 151-200, 201-250, 251-300, 301-350, 351-400, 401-450, 451-500, 501-550, 551-600, 601-650, 651-700, 701-750, 751-800, 801-850, 851-900, 901-950, 951-1000, 1001-1050, 1051-1100, 1101-1150, 1151-1200, 1201-1250, 1251-1300, 1301-1350, 1351-1400, 1401-1450, 1451-1500, 1501-1550, 1551-1600, 1601-1650, 1651-1700, 1701-1750, 1751-1800, 1801-1850, 1851-1900, 1901-1950, 1951-2000, 2001-2050, 2051-2100, 2101-2150, 2151-2200, 2201-2250, 2251-2300, 2301-2350, 2351-2400, 2401-2450, 2451-2500, 2501-2550, 2551-2600, 2601-2650, 2651-2700, 2701-2750, 2751-2800, 2801-2850, 2851-2900, 2901-2950, 2951-3000, 3001-3050, 3051-3100, 3101-3150, 3151-3200, 3201-3250, 3251-3300, 3301-3350, 3351-3400, 3401-3450, 3451-3500, 3501-3550, 3551-3600, 3601-3650, 3651-3700, 3701-3750, 3751-3800, 3801-3850, 3851-3900, 3901-3950, 3951-4000, 4001-4050, 4051-4100, 4101-4150, 4151-4200, 4201-4250, 4251-4300, 4301-4350, 4351-4400, 4401-4450, 4451-4500, 4501-4550, 4551-4600, 4601-4650, 4651-4700, 4701-4750, 4751-4800, 4801-4850, 4851-4900, 4901-4950, 4951-5000, 5001-5050, 5051-5100, 5101-5150, 5151-5200, 5201-5250, 5251-5300, 5301-5350, 5351-5400, 5401-5450, 5451-5500, 5501-5550, 5551-5600, 5601-5650, 5651-5700, 5701-5750, 5751-5800, 5801-5850, 5851-5900, 5901-5950, 5951-6000, 6001-6050, 6051-6100, 6101-6150, 6151-6200, 6201-6250, 6251-6300, 6301-6350, 6351-6400, 6401-6450, 6451-6500, 6501-6550, 6551-6600, 6601-6650, 6651-6700, 6701-6750, 6751-6800, 6801-6850, 6851-6900, 6901-6950, 6951-7000, 7001-7050, 7051-7100, 7101-7150, 7151-7200, 7201-7250, 7251-7300 or 7301 to the end of the cDNA sequence contained in Clone ID NO:Z, or the complementary strand thereto. In this context “about” includes the particularly recited range or a range larger or smaller by several (5, 4, 3, 2, or 1) nucleotides, at either terminus or at both termini. Preferably, these fragments encode a polypeptide which has a functional activity (e.g., biological activity). More preferably, these polynucleotides can be used as probes or primers as discussed herein. Polynucleotides which hybridize to one or more of these polynucleotides under stringent hybridization conditions or alternatively, under lower stringency conditions are also encompassed by the invention, as are polypeptides encoded by these polynucleotides.

[0133] Moreover, representative examples of polynucleotide fragments of the invention comprise, or alternatively consist of, a nucleic acid sequence comprising one, two, three, four, five, six, seven, eight, nine, ten, or more of the above described polynucleotide fragments of the invention in combination with a polynucleotide sequence delineated in Table 1B column 6. Additional, representative examples of polynucleotide fragments of the invention comprise, or alternatively consist of, a nucleic acid sequence comprising one, two, three, four, five, six, seven, eight, nine, ten, or more of the above described polynucleotide fragments of the invention in combination with a polynucleotide sequence that is the complementary strand of a sequence delineated in column 6 of Table 1B. In further embodiments, the above-described polynucleotide fragments of the invention comprise, or alternatively consist of, sequences delineated in Table 1B, column 6, and have a nucleic acid sequence which is different from that of the BAC fragment having the sequence disclosed in SEQ ID NO:B (see Table 1B, column 5). In additional embodiments, the above-described polynucleotide fragments of the invention comprise, or alternatively consist of, sequences delineated in Table 1B, column 6, and have a nucleic acid sequence which is different from that published for the BAC clone identified as BAC ID NO:A (see Table 1B, column 4). In additional embodiments, the above-described polynucleotides of the invention comprise, or alternatively consist of, sequences delineated Table 1B, column 6, and have a nucleic acid sequence which is different from that contained in the BAC clone identified as BAC ID NO:A (see Table 1B, column 4). Polypeptides encoded by these polynucleotides, other polynucleotides that encode these polypeptides, and antibodies that bind these polypeptides are also encompassed by the invention. Additionally, fragments and variants of the above-described polynucleotides and polypeptides are also encompassed by the invention.

[0134] In additional specific embodiments, polynucleotides of the invention comprise, or alternatively consist of, one, two, three, four, five, six, seven, eight, nine, ten, or more fragments of the sequences delineated in column 6 of Table 1B, and the polynucleotide sequence of SEQ ID NO:X (e.g., as defined in Table 1B, column 2) or fragments or variants thereof. Polypeptides encoded by these polynucleotides, other polynucleotides that encode these polypeptides, and antibodies that bind these polypeptides are also encompassed by the invention.

[0135] In additional specific embodiments, polynucleotides of the invention comprise, or alternatively consist of, one, two, three, four, five, six, seven, eight, nine, ten, or more fragments of the sequences delineated in column 6 of Table 1B which correspond to the same Clone ID NO:Z (see Table 1B, column 1), and the polynucleotide sequence of SEQ ID NO:X (e.g., as defined in Table 1A or 1B) or fragments or variants thereof. Polypeptides encoded by these polynucleotides, other polynucleotides that encode these polypeptides, and antibodies that bind these polypeptides are also encompassed by the invention.

[0136] In further specific embodiments, polynucleotides of the invention comprise, or alternatively consist of, one, two, three, four, five, six, seven, eight, nine, ten, or more fragments of the sequences delineated in the same row of column 6 of Table 1B, and the polynucleotide sequence of SEQ ID NO:X (e.g., as defined in Table 1A or 1B) or fragments or variants thereof. Polypeptides encoded by these polynucleotides, other polynucleotides that encode these polypeptides, and antibodies that bind these polypeptides are also encompassed by the invention.

[0137] In additional specific embodiments, polynucleotides of the invention comprise, or alternatively consist of a polynucleotide sequence in which the 3′ 10 polynucleotides of one of the sequences delineated in column 6 of Table 1B and the 5′ 10 polynucleotides of the sequence of SEQ ID NO:X are directly contiguous. Nucleic acids which hybridize to the complement of these 20 contiguous polynucleotides under stringent hybridization conditions or alternatively, under lower stringency conditions, are also encompassed by the invention. Polypeptides encoded by these polynucleotides and/or nucleic acids, other polynucleotides and/or nucleic acids that encode these polypeptides, and antibodies that bind these polypeptides are also encompassed by the invention. Additionally, fragments and variants of the above-described polynucleotides, nucleic acids, and polypeptides are also encompassed by the invention.

[0138] In additional specific embodiments, polynucleotides of the invention comprise, or alternatively consist of a polynucleotide sequence in which the 3′ 10 polynucleotides of one of the sequences delineated in column 6 of Table 1B and the 5′ 10 polynucleotides of a fragment or variant of the sequence of SEQ ID NO:X (e.g., as described herein) are directly contiguous Nucleic acids which hybridize to the complement of these 20 contiguous polynucleotides under stringent hybridization conditions or alternatively, under lower stringency conditions, are also encompassed by the invention. Polypeptides encoded by these polynucleotides and/or nucleic acids, other polynucleotides and/or nucleic acids encoding these polypeptides, and antibodies that bind these polypeptides are also encompassed by the invention. Additionally, fragments and variants of the above-described polynucleotides, nucleic acids, and polypeptides are also encompassed by the invention.

[0139] In further specific embodiments, polynucleotides of the invention comprise, or alternatively consist of a polynucleotide sequence in which the 3′ 10 polynucleotides of a fragment or variant of the sequence of SEQ ID NO:X and the 5′ 10 polynucleotides of the sequence of one of the sequences delineated in column 6 of Table 1B are directly contiguous. Nucleic acids which hybridize to the complement of these 20 contiguous polynucleotides under stringent hybridization conditions or alternatively, under lower stringency conditions, are also encompassed by the invention. Polypeptides encoded by these polynucleotides and/or nucleic acids, other polynucleotides and/or nucleic acids encoding these polypeptides, and antibodies that bind these polypeptides are also encompassed by the invention. Additionally, fragments and variants of the above-described polynucleotides, nucleic acids, and polypeptides are also encompassed by the invention.

[0140] In specific embodiments, polynucleotides of the invention comprise, or alternatively consist of a polynucleotide sequence in which the 3′ 10 polynucleotides of one of the sequences delineated in column 6 of Table 1B and the 5′ 10 polynucleotides of another sequence in column 6 are directly contiguous. In preferred embodiments, the 3′ 10 polynucleotides of one of the sequences delineated in column 6 of Table 1B is directly contiguous with the 5′ 10 polynucleotides of the next sequential exon delineated in Table 1B, column 6. Nucleic acids which hybridize to the complement of these 20 contiguous polynucleotides under stringent hybridization conditions or alternatively, under lower stringency conditions, are also encompassed by the invention. Polypeptides encoded by these polynucleotides and/or nucleic acids, other polynucleotides and/or nucleic acids encoding these polypeptides, and antibodies that bind these polypeptides are also encompassed by the invention. Additionally, fragments and variants of the above-described polynucleotides, nucleic acids, and polypeptides are also encompassed by the invention.

[0141] In the present invention, a “polypeptide fragment” refers to an amino acid sequence which is a portion of that contained in SEQ ID NO:Y, a portion of an amino acid sequence encoded by the portion of SEQ ID NO:X as defined in columns 8 and 9 of Table 2, a portion of an amino acid sequence encoded by the polynucleotide sequence of SEQ ID NO:X, a portion of an amino acid sequence encoded by the complement of the polynucleotide sequence in SEQ ID NO:X, and/or a portion of an amino acid sequence encoded by the cDNA contained in Clone ID NO:Z. Protein (polypeptide) fragments may be “free-standing,” or comprised within a larger polypeptide of which the fragment forms a part or region, most preferably as a single continuous region. Representative examples of polypeptide fragments of the invention, include, for example, fragments comprising, or alternatively consisting of, from about amino acid number 1-20, 21-40, 41-60, 61-80, 81-100, 101-120, 121-140, 141-160, 161-180, 181-200, 201-220, 221-240, 241-260, 261-280, 281-300, 301-320, 321-340, 341-360, 361-380, 381-400, 401-420, 421-440, 441-460, 461-480, 481-500, 501-520, 521-540, 541-560, 561-580, 581-600, 601-620, 621-640, 641-660, 661-680, 681-700, 701-720, 721-740, 741-760, 761-780, 781-800, 801-820, 821-840, 841-860, 861-880, 881-900, 901-920, 921-940, 941-960, 961-980, 981-1000, 1001-1020, 1021-1040, 1041-1060, 1061-1080, 1081-1100, 1101-1120, 1121-1140, 1141-1160, 1161-1180, 1181-1200, 1201-1220, 1221-1240, 1241-1260, 1261-1280, 1281-1300, 1301-1320, 1321-1340, 1341-1360, 1361-1380, 1381-1400, 1401-1420, 1421-1440, or 1441 to the end of the coding region of cDNA and SEQ ID NO: Y. In a preferred embodiment, polypeptide fragments of the invention include, for example, fragments comprising, or alternatively consisting of, from about amino acid number 1-20, 21-40, 4L-60, 61-80, 81-100, 101-120, 121-140, 141-160, 161-180, 181-200, 201-220, 221-240, 241-260, 261-280, 281-300, 301-320, 321-340, 341-360, 361-380, 381-400, 401-420, 421-440, 441-460, 461-480, 481-500, 501-520, 521-540, 541-560, 561-580, 581-600, 601-620, 621-640, 641-660, 661-680, 681-700, 701-720, 721-740, 741-760, 761-780, 781-800, 801-820, 821-840, 841-860, 861-880, 881-900, 901-920, 921-940, 941-960, 961-980, 981-1000, 1001-1020, 1021-1040, 1041-1060, 1061-1080, 1081-1100, 1101-1120, 1121-1140, 1141-1160, 1161-1180, 1181-1200, 1201-1220, 1221-1240, 1241-1260, 1261-1280, 1281-1300, 1301-1320, 1321-1340, 1341-1360, 1361-1380, 1381-1400, 1401-1420, 1421-1440, or 1441 to the end of the coding region of SEQ ID NO:Y. Moreover, polypeptide fragments of the invention may be at least about 10, 15, 20, 25, 30, 35, 40, 45, 50, 55, 60, 65, 70, 75, 80, 85, 90, 100, 110, 120, 130, 140, or 150 amino acids in length. In this context “about” includes the particularly recited ranges or values, or ranges or values larger or smaller by several (5, 4, 3, 2, or 1) amino acids, at either extreme or at both extremes. Polynucleotides encoding these polypeptide fragments are also encompassed by the invention.

[0142] Even if deletion of one or more amino acids from the N-terminus of a protein results in modification of loss of one or more biological functions of the protein, other functional activities (e.g., biological activities, ability to multimerize, ability to bind a ligand) may still be retained. For example, the ability of shortened muteins to induce and/or bind to antibodies which recognize the complete or mature forms of the polypeptides generally will be retained when less than the majority of the residues of the complete or mature polypeptide are removed from the N-terminus. Whether a particular polypeptide lacking N-terminal residues of a complete polypeptide retains such immunologic activities can readily be determined by routine methods described herein and otherwise known in the art. It is not unlikely that a mutein with a large number of deleted N-terminal amino acid residues may retain some biological or immunogenic activities. In fact, peptides composed of as few as six amino acid residues may often evoke an immune response.

[0143] Accordingly, polypeptide fragments include the secreted protein as well as the mature form. Further preferred polypeptide fragments include the secreted protein or the mature form having a continuous series of deleted residues from the amino or the carboxy terminus, or both. For example, any number of amino acids, ranging from 1-60, can be deleted from the amino terminus of either the secreted polypeptide or the mature form. Similarly, any number of amino acids, ranging from 1-30, can be deleted from the carboxy terminus of the secreted protein or mature form. Furthermore, any combination of the above amino and carboxy terminus deletions are preferred. Similarly, polynucleotides encoding these polypeptide fragments are also preferred.

[0144] The present invention further provides polypeptides having one or more residues deleted from the amino terminus of the amino acid sequence of a polypeptide disclosed herein (e.g., a polypeptide of SEQ ID NO:Y, a polypeptide encoded by the polynucleotide sequence contained in SEQ ID NO:X or the complement thereof, a polypeptide encoded by the portion of SEQ ID NO:X as defined in columns 8 and 9 of Table 2, a polypeptide encoded by the portion of SEQ ID NO:B as defined in column 6 of Table 1B, and/or a polypeptide encoded by the cDNA contained in Clone ID NO:Z). In particular, N-terminal deletions may be described by the general formula m−q, where q is a whole integer representing the total number of amino acid residues in a polypeptide of the invention (e.g., the polypeptide disclosed in SEQ ID NO:Y, or the polypeptide encoded by the portion of SEQ ID NO:X as defined in columns 8 and 9 of Table 2), and m is defined as any integer ranging from 2 to q−6. Polynucleotides encoding these polypeptides are also encompassed by the invention.

[0145] The present invention further provides polypeptides having one or more residues from the carboxy terminus of the amino acid sequence of a polypeptide disclosed herein (e.g., a polypeptide of SEQ ID NO:Y, a polypeptide encoded by the polynucleotide sequence contained in SEQ ID NO:X, a polypeptide encoded by the portion of SEQ ID NO:X as defined in columns 8 and 9 of Table 2, and/or a polypeptide encoded by the cDNA contained in Clone ID NO:Z). In particular, C-terminal deletions may be described by the general formula 1−n, where n is any whole integer ranging from 6 to q−1, and where n corresponds to the position of amino acid residue in a polypeptide of the invention. Polynucleotides encoding these polypeptides are also encompassed by the invention.

[0146] In addition, any of the above described N- or C-terminal deletions can be combined to produce a N- and C-terminal deleted polypeptide. The invention also provides polypeptides having one or more amino acids deleted from both the amino and the carboxyl termini, which may be described generally as having residues m-n of a polypeptide encoded by SEQ ID NO:X (e.g., including, but not limited to, the preferred polypeptide disclosed as SEQ ID NO:Y and the polypeptide encoded by the portion of SEQ ID NO:X as defined in columns 8 and 9 of Table 2), the cDNA contained in Clone ID NO:Z, and/or the complement thereof, where n and m are integers as described above. Polynucleotides encoding these polypeptides are also encompassed by the invention.

[0147] Also as mentioned above, even if deletion of one or more amino acids from the C-terminus of a protein results in modification of loss of one or more biological functions of the protein, other functional activities (e.g., biological activities, ability to multimerize, ability to bind a ligand) may still be retained. For example the ability of the shortened mutein to induce and/or bind to antibodies which recognize the complete or mature forms of the polypeptide generally will be retained when less than the majority of the residues of the complete or mature polypeptide are removed from the C-terminus. Whether a particular polypeptide lacking C-terminal residues of a complete polypeptide retains such immunologic activities can readily be determined by routine methods described herein and otherwise known in the art. It is not unlikely that a mutein with a large number of deleted C-terminal amino acid residues may retain some biological or immunogenic activities. In fact, peptides composed of as few as six amino acid residues may often evoke an immune response.

[0148] The present application is also directed to proteins containing polypeptides at least 80%, 85%, 90%, 95%, 96%, 97%, 98% or 99% identical to a polypeptide sequence set forth herein. In preferred embodiments, the application is directed to proteins containing polypeptides at least 80%, 85%, 90%, 95%, 96%, 97%, 98% or 99% identical to polypeptides having the amino acid sequence of the specific N- and C-terminal deletions. Polynucleotides encoding these polypeptides are also encompassed by the invention.

[0149] Any polypeptide sequence encoded by, for example, the polynucleotide sequences set forth as SEQ ID NO:X or the complement thereof, (presented, for example, in Tables 1A and 2), the cDNA contained in Clone ID NO:Z, or the polynucleotide sequence as defined in column 6 of Table 1B, may be analyzed to determine certain preferred regions of the polypeptide. For example, the amino acid sequence of a polypeptide encoded by a polynucleotide sequence of SEQ ID NO:X (e.g., the polypeptide of SEQ ID NO:Y and the polypeptide encoded by the portion of SEQ ID NO:X as defined in columns 8 and 9 of Table 2) or the cDNA contained in Clone ID NO:Z may be analyzed using the default parameters of the DNASTAR computer algorithm (DNASTAR, Inc., 1228 S. Park St., Madison, Wis. 53715 USA; http://www.dnastar.com/).

[0150] Polypeptide regions that may be routinely obtained using the DNASTAR computer algorithm include, but are not limited to, Garnier-Robson alpha-regions, beta-regions, turn-regions, and coil-regions; Chou-Fasman alpha-regions, beta-regions, and turn-regions; Kyte-Doolittle hydrophilic regions and hydrophobic regions; Eisenberg alpha- and beta-amphipathic regions; Karplus-Schulz flexible regions; Emini surface-forming regions; and Jameson-Wolf regions of high antigenic index. Among highly preferred polynucleotides of the invention in this regard are those that encode polypeptides comprising regions that combine several structural features, such as several (e.g., 1, 2, 3 or 4) of the features set out above.

[0151] Additionally, Kyte-Doolittle hydrophilic regions and hydrophobic regions, Emini surface-forming regions, and Jameson-Wolf regions of high antigenic index (i.e., containing four or more contiguous amino acids having an antigenic index of greater than or equal to 1.5, as identified using the default parameters of the Jameson-Wolf program) can routinely be used to determine polypeptide regions that exhibit a high degree of potential for antigenicity. Regions of high antigenicity are determined from data by DNASTAR analysis by choosing values which represent regions of the polypeptide which are likely to be exposed on the surface of the polypeptide in an environment in which antigen recognition may occur in the process of initiation of an immune response.

[0152] Preferred polypeptide fragments of the invention are fragments comprising, or alternatively, consisting of, an amino acid sequence that displays a functional activity (e.g. biological activity) of the polypeptide sequence of which the amino acid sequence is a fragment. By a polypeptide displaying a “functional activity” is meant a polypeptide capable of one or more known functional activities associated with a full-length protein, such as, for example, biological activity, antigenicity, immunogenicity, and/or multimerization, as described herein.

[0153] Other preferred polypeptide fragments are biologically active fragments. Biologically active fragments are those exhibiting activity similar, but not necessarily identical, to an activity of the polypeptide of the present invention. The biological activity of the fragments may include an improved desired activity, or a decreased undesirable activity.

[0154] In preferred embodiments, polypeptides of the invention comprise, or alternatively consist of, one, two, three, four, five or more of the antigenic fragments of the polypeptide of SEQ ID NO:Y, or portions thereof. Polynucleotides encoding these polypeptides are also encompassed by the invention.

[0155] The present invention encompasses polypeptides comprising, or alternatively consisting of, an epitope of: the polypeptide sequence shown in SEQ ID NO:Y; a polypeptide sequence encoded by SEQ ID NO:X or the complementary strand thereto; the polypeptide sequence encoded by the portion of SEQ ID NO:X as defined in columns 8 and 9 of Table 2; the polypeptide sequence encoded by the portion of SEQ ID NO:B as defined in column 6 of Table 1B or the complement thereto; the polypeptide sequence encoded by the cDNA contained in Clone ID NO:Z; or the polypeptide sequence encoded by a polynucleotide that hybridizes to the sequence of SEQ ID NO:X, the complement of the sequence of SEQ ID NO:X, the complement of a portion of SEQ ID NO:X as defined in columns 8 and 9 of Table 2, or the cDNA sequence contained in Clone ID NO:Z under stringent hybridization conditions or alternatively, under lower stringency hybridization as defined supra. The present invention further encompasses polynucleotide sequences encoding an epitope of a polypeptide sequence of the invention (such as, for example, the sequence disclosed in SEQ ID NO:X, or a fragment thereof), polynucleotide sequences of the complementary strand of a polynucleotide sequence encoding an epitope of the invention, and polynucleotide sequences which hybridize to the complementary strand under stringent hybridization conditions or alternatively, under lower stringency hybridization conditions defined supra.

[0156] The term “epitopes,” as used herein, refers to portions of a polypeptide having antigenic or immunogenic activity in an animal, preferably a mammal, and most preferably in a human. In a preferred embodiment, the present invention encompasses a polypeptide comprising an epitope, as well as the polynucleotide encoding this polypeptide. An “immunogenic epitope,” as used herein, is defined as a portion of a protein that elicits an antibody response in an animal, as determined by any method known in the art, for example, by the methods for generating antibodies described infra. (See, for example, Geysen et al., Proc. Natl. Acad. Sci. USA 81:3998-4002 (1983)). The term “antigenic epitope,” as used herein, is defined as a portion of a protein to which an antibody can immunospecifically bind its antigen as determined by any method well known in the art, for example, by the immunoassays described herein. Immunospecific binding excludes non-specific binding but does not necessarily exclude cross-reactivity with other antigens. Antigenic epitopes need not necessarily be immunogenic.

[0157] Fragments which function as epitopes may be produced by any conventional means. (See, e.g., Houghten, R. A., Proc. Natl. Acad. Sci. USA 82:5131-5135 (1985) further described in U.S. Pat. No. 4,631,211.)

[0158] In the present invention, antigenic epitopes preferably contain a sequence of at least 4, at least 5, at least 6, at least 7, more preferably at least 8, at least 9, at least 10, at least 11, at least 12, at least 13, at least 14, at least 15, at least 20, at least 25, at least 30, at least 40, at least 50, and, most preferably, between about 15 to about 30 amino acids. Preferred polypeptides comprising immunogenic or antigenic epitopes are at least 10, 15, 20, 25, 30, 35, 40, 45, 50, 55, 60, 65, 70, 75, 80, 85, 90, 95, or 100 amino acid residues in length. Additional non-exclusive preferred antigenic epitopes include the antigenic epitopes disclosed herein, as well as portions thereof. Antigenic epitopes are useful, for example, to raise antibodies, including monoclonal antibodies, that specifically bind the epitope. Preferred antigenic epitopes include the antigenic epitopes disclosed herein, as well as any combination of two, three, four, five or more of these antigenic epitopes. Antigenic epitopes can be used as the target molecules in immunoassays. (See, for instance, Wilson et al., Cell 37:767-778 (1984); Sutcliffe et al., Science 219:660-666 (1983)).

[0159] Non-limiting examples of epitopes of polypeptides that can be used to generate antibodies of the invention include a polypeptide comprising, or alternatively consisting of, at least one, two, three, four, five, six or more of the portion(s) of SEQ ID NO:Y specified in column 7 of Table 1A. These polypeptide fragments have been determined to bear antigenic epitopes of the proteins of the invention by the analysis of the Jameson-Wolf antigenic index which is included in the DNAStar suite of computer programs. By “comprise” it is intended that a polypeptide contains at least one, two, three, four, five, six or more of the portion(s) of SEQ ID NO:Y shown in column 7 of Table 1A, but it may contain additional flanking residues on either the amino or carboxyl termini of the recited portion. Such additional flanking sequences are preferably sequences naturally found adjacent to the portion; i.e., contiguous sequence shown in SEQ ID NO:Y. The flanking sequence may, however, be sequences from a heterolgous polypeptide, such as from another protein described herein or from a heterologous polypeptide not described herein. In particular embodiments, epitope portions of a polypeptide of the invention comprise one, two, three, or more of the portions of SEQ ID NO:Y shown in column 7 of Table 1A.

[0160] Similarly, immunogenic epitopes can be used, for example, to induce antibodies according to methods well known in the art. See, for instance, Sutcliffe et al., supra; Wilson et al., supra; Chow et al., Proc. Natl. Acad. Sci. USA 82:910-914; and Bittle et al., J. Gen. Virol. 66:2347-2354 (1985). Preferred immunogenic epitopes include the immunogenic epitopes disclosed herein, as well as any combination of two, three, four, five or more of these immunogenic epitopes. The polypeptides comprising one or more immunogenic epitopes may be presented for eliciting an antibody response together with a carrier protein, such as an albumin, to an animal system (such as rabbit or mouse), or, if the polypeptide is of sufficient length (at least about 25 amino acids), the polypeptide may be presented without a carrier. However, immunogenic epitopes comprising as few as 8 to 10 amino acids have been shown to be sufficient to raise antibodies capable of binding to, at the very least, linear epitopes in a denatured polypeptide (e.g., in Western blotting).

[0161] Epitope-bearing polypeptides of the present invention may be used to induce antibodies according to methods well known in the art including, but not limited to, in vivo immunization, in vitro immunization, and phage display methods. See, e.g., Sutcliffe et al., supra; Wilson et al., supra, and Bittle et al., J. Gen. Virol., 66:2347-2354 (1985). If in vivo immunization is used, animals may be immunized with free peptide; however, anti-peptide antibody titer may be boosted by coupling the peptide to a macromolecular carrier, such as keyhole limpet hemacyanin (KLH) or tetanus toxoid. For instance, peptides containing cysteine residues may be coupled to a carrier using a linker such as maleimidobenzoyl-N-hydroxysuccinimide ester (MBS), while other peptides may be coupled to carriers using a more general linking agent such as glutaraldehyde. Animals such as rabbits, rats and mice are immunized with either free or carrier-coupled peptides, for instance, by intraperitoneal and/or intradermal injection of emulsions containing about 100 μg of peptide or carrier protein and Freund's adjuvant or any other adjuvant known for stimulating an immune response. Several booster injections may be needed, for instance, at intervals of about two weeks, to provide a useful titer of anti-peptide antibody which can be detected, for example, by ELISA assay using free peptide adsorbed to a solid surface. The titer of anti-peptide antibodies in serum from an immunized animal may be increased by selection of anti-peptide antibodies, for instance, by adsorption to the peptide on a solid support and elution of the selected antibodies according to methods well known in the art.

[0162] As one of skill in the art will appreciate, and as discussed above, the polypeptides of the present invention (e.g., those comprising an immunogenic or antigenic epitope) can be fused to heterologous polypeptide sequences. For example, polypeptides of the present invention (including fragments or variants thereof), may be fused with the constant domain of immunoglobulins (IgA, IgE, IgG, IgM), or portions thereof (CH1, CH2, CH3, or any combination thereof and portions thereof, resulting in chimeric polypeptides. By way of another non-limiting example, polypeptides and/or antibodies of the present invention (including fragments or variants thereof) may be fused with albumin (including but not limited to recombinant human serum albumin or fragments or variants thereof (see, e.g., U.S. Pat. No. 5,876,969, issued Mar. 2, 1999, EP Patent 0 413 622, and U.S. Pat. No. 5,766,883, issued Jun. 16, 1998, herein incorporated by reference in their entirety)). In a preferred embodiment, polypeptides and/or antibodies of the present invention (including fragments or variants thereof) are fused with the mature form of human serum albumin (i.e., amino acids 1-585 of human serum albumin as shown in FIGS. 1 and 2 of EP Patent 0 322 094) which is herein incorporated by reference in its entirety. In another preferred embodiment, polypeptides and/or antibodies of the present invention (including fragments or variants thereof) are fused with polypeptide fragments comprising, or alternatively consisting of, amino acid residues 1−z of human serum albumin, where z is an integer from 369 to 419, as described in U.S. Pat. No. 5,766,883 herein incorporated by reference in its entirety. Polypeptides and/or antibodies of the present invention (including fragments or variants thereof) may be fused to either the N- or C-terminal end of the heterologous protein (e.g., immunoglobulin Fc polypeptide or human serum albumin polypeptide). Polynucleotides encoding fusion proteins of the invention are also encompassed by the invention.

[0163] Such fusion proteins as those described above may facilitate purification and may increase half-life in vivo. This has been shown for chimeric proteins consisting of the first two domains of the human CD4-polypeptide and various domains of the constant regions of the heavy or light chains of mammalian immunoglobulins. See, e.g., EP 394,827; Traunecker et al., Nature, 331:84-86 (1988). Enhanced delivery of an antigen across the epithelial barrier to the immune system has been demonstrated for antigens (e.g., insulin) conjugated to an FcRn binding partner such as IgG or Fc fragments (see, e.g., PCT Publications WO 96/22024 and WO 99/04813). IgG fusion proteins that have a disulfide-linked dimeric structure due to the IgG portion desulfide bonds have also been found to be more efficient in binding and neutralizing other molecules than monomeric polypeptides or fragments thereof alone. See, e.g., Fountoulakis et al., J. Biochem., 270:3958-3964 (1995). Nucleic acids encoding the above epitopes can also be recombined with a gene of interest as an epitope tag (e.g., the hemagglutinin (HA) tag or flag tag) to aid in detection and purification of the expressed polypeptide. For example, a system described by Janknecht et al. allows for the ready purification of non-denatured fusion proteins expressed in human cell lines (Janknecht et al., 1991, Proc. Natl. Acad. Sci. USA 88:8972-897). In this system, the gene of interest is subcloned into a vaccinia recombination plasmid such that the open reading frame of the gene is translationally fused to an amino-terminal tag consisting of six histidine residues. The tag serves as a matrix binding domain for the fusion protein. Extracts from cells infected with the recombinant vaccinia virus are loaded onto Ni2+ nitriloacetic acid-agarose column and histidine-tagged proteins can be selectively eluted with imidazole-containing buffers.

[0164] Fusion Proteins

[0165] Any polypeptide of the present invention can be used to generate fusion proteins. For example, the polypeptide of the present invention, when fused to a second protein, can be used as an antigenic tag. Antibodies raised against the polypeptide of the present invention can be used to indirectly detect the second protein by binding to the polypeptide. Moreover, because secreted proteins target cellular locations based on trafficking signals, polypeptides of the present invention which are shown to be secreted can be used as targeting molecules once fused to other proteins.

[0166] Examples of domains that can be fused to polypeptides of the present invention include not only heterologous signal sequences, but also other heterologous functional regions. The fusion does not necessarily need to be direct, but may occur through linker sequences.

[0167] In certain preferred embodiments, proteins of the invention are fusion proteins comprising an amino acid sequence that is an N and/or C-terminal deletion of a polypeptide of the invention. In preferred embodiments, the invention is directed to a fusion protein comprising an amino acid sequence that is at least 90%, 95%, 96%, 97%, 98% or 99% identical to a polypeptide sequence of the invention. Polynucleotides encoding these proteins are also encompassed by the invention.

[0168] Moreover, fusion proteins may also be engineered to improve characteristics of the polypeptide of the present invention. For instance, a region of additional amino acids, particularly charged amino acids, may be added to the N-terminus of the polypeptide to improve stability and persistence during purification from the host cell or subsequent handling and storage. Also, peptide moieties may be added to the polypeptide to facilitate purification. Such regions may be removed prior to final preparation of the polypeptide. The addition of peptide moieties to facilitate handling of polypeptides are familiar and routine techniques in the art.

[0169] As one of skill in the art will appreciate that, as discussed above, polypeptides of the present invention, and epitope-bearing fragments thereof, can be combined with heterologous polypeptide sequences. For example, the polypeptides of the present invention may be fused with heterologous polypeptide sequences, for example, the polypeptides of the present invention may be fused with the constant domain of immunoglobulins (IgA, IgE, IgG, IgM) or portions thereof (CH1, CH2, CH3, and any combination thereof, including both entire domains and portions thereof), or albumin (including, but not limited to, native or recombinant human albumin or fragments or variants thereof (see, e.g., U.S. Pat. No. 5,876,969, issued Mar. 2, 1999, EP Patent 0 413 622, and U.S. Pat. No. 5,766,883, issued Jun. 16, 1998, herein incorporated by reference in their entirety)), resulting in chimeric polypeptides. For example, EP-A-O 464 533 (Canadian counterpart 2045869) discloses fusion proteins comprising various portions of constant region of immunoglobulin molecules together with another human protein or part thereof. In many cases, the Fc part in a fusion protein is beneficial in therapy and diagnosis, and thus can result in, for example, improved pharmacokinetic properties (EP-A 0232 262). Alternatively, deleting the Fe part after the fusion protein has been expressed, detected, and purified, would be desired. For example, the Fe portion may hinder therapy and diagnosis if the fusion protein is used as an antigen for immunizations. In drug discovery, for example, human proteins, such as hIL-5, have been fused with Fe portions for the purpose of high-throughput screening assays to identify antagonists of hIL-5. See, D. Bennett et al., J. Molecular Recognition 8:52-58 (1995); K. Johanson et al., J. Biol. Chem. 270:9459-9471 (1995).

[0170] Moreover, the polypeptides of the present invention can be fused to marker sequences, such as a polypeptide which facilitates purification of the fused polypeptide. In preferred embodiments, the marker amino acid sequence is a hexa-histidine peptide, such as the tag provided in a pQE vector (QIAGEN, Inc., 9259 Eton Avenue, Chatsworth, Calif., 91311), among others, many of which are commercially available. As described in Gentz et al., Proc. Natl. Acad. Sci. USA 86:821-824 (1989), for instance, hexa-histidine provides for convenient purification of the fusion protein. Another peptide tag useful for purification, the “HA” tag, corresponds to an epitope derived from the influenza hemagglutinin protein (Wilson et al., Cell 37:767 (1984)).

[0171] Additional fusion proteins of the invention may be generated through the techniques of gene-shuffling, motif-shuffling, exon-shuffling, and/or codon-shuffling (collectively referred to as “DNA shuffling”). DNA shuffling may be employed to modulate the activities of polypeptides of the invention, such methods can be used to generate polypeptides with altered activity, as well as agonists and antagonists of the polypeptides. See, generally, U.S. Pat. Nos. 5,605,793; 5,811,238; 5,830,721; 5,834,252; and 5,837,458, and Patten et al., Curr. Opinion Biotechnol. 8:724-33 (1997); Harayama, Trends Biotechnol. 16(2):76-82 (1998); Hansson, et al., J. Mol. Biol. 287:265-76 (1999); and Lorenzo and Blasco, Biotechniques 24(2):308-13 (1998) (each of these patents and publications are hereby incorporated by reference in its entirety). In one embodiment, alteration of polynucleotides corresponding to SEQ ID NO:X and the polypeptides encoded by these polynucleotides may be achieved by DNA shuffling. DNA shuffling involves the assembly of two or more DNA segments by homologous or site-specific recombination to generate variation in the polynucleotide sequence. In another embodiment, polynucleotides of the invention, or the encoded polypeptides, may be altered by being subjected to random mutagenesis by error-prone PCR, random nucleotide insertion or other methods prior to recombination. In another embodiment, one or more components, motifs, sections, parts, domains, fragments, etc., of a polynucleotide encoding a polypeptide of the invention may be recombined with one or more components, motifs, sections, parts, domains, fragments, etc. of one or more heterologous molecules.

[0172] Thus, any of these above fusions can be engineered using the polynucleotides or the polypeptides of the present invention.

[0173] Recombinant and Synthetic Production of Polypeptides of the Invention

[0174] The present invention also relates to vectors containing the polynucleotide of the present invention, host cells, and the production of polypeptides by synthetic and recombinant techniques. The vector may be, for example, a phage, plasmid, viral, or retroviral vector. Retroviral vectors may be replication competent or replication defective. In the latter case, viral propagation generally will occur only in complementing host cells.

[0175] The polynucleotides of the invention may be joined to a vector containing a selectable marker for propagation in a host. Generally, a plasmid vector is introduced in a precipitate, such as a calcium phosphate precipitate, or in a complex with a charged lipid. If the vector is a virus, it may be packaged in vitro using an appropriate packaging cell line and then transduced into host cells.

[0176] The polynucleotide insert should be operatively linked to an appropriate promoter, such as the phage lambda PL promoter, the E. coli lac, trp, phoA and tac promoters, the SV40 early and late promoters and promoters of retroviral LTRs, to name a few. Other suitable promoters will be known to the skilled artisan. The expression constructs will further contain sites for transcription initiation, termination, and, in the transcribed region, a ribosome binding site for translation. The coding portion of the transcripts expressed by the constructs will preferably include a translation initiating codon at the beginning and a termination codon (UAA, UGA or UAG) appropriately positioned at the end of the polypeptide to be translated.

[0177] As indicated, the expression vectors will preferably include at least one selectable marker. Such markers include dihydrofolate reductase, G418, glutamine synthase, or neomycin resistance for eukaryotic cell culture, and tetracycline, kanamycin or ampicillin resistance genes for culturing in E. coli and other bacteria. Representative examples of appropriate hosts include, but are not limited to, bacterial cells, such as E. coli, Streptomyces and Salmonella typhimurium cells; fungal cells, such as yeast cells (e.g., Saccharomyces cerevisiae or Pichia pastoris (ATCC Accession No. 201178)); insect cells such as Drosophila S2 and Spodoptera Sf9 cells; animal cells such as CHO, COS, 293, and Bowes melanoma cells; and plant cells. Appropriate culture mediums and conditions for the above-described host cells are known in the art.

[0178] Among vectors preferred for use in bacteria include pQE70, pQE60 and pQE-9, available from QIAGEN, Inc.; pBluescript vectors, Phagescript vectors, pNH8A, pNH16a, pNH 18A, pNH46A, available from Stratagene Cloning Systems, Inc.; and ptrc99a, pKK223-3, pKK233-3, pDR540, pRIT5 available from Pharmacia Biotech, Inc. Among preferred eukaryotic vectors are pWLNEO, pSV2CAT, pOG44, pXT1 and pSG available from Stratagene; and pSVK3, pBPV, pMSG and pSVL available from Pharmacia. Preferred expression vectors for use in yeast systems include, but are not limited to pYES2, pYD1, pTEF1/Zeo, pYES2/GS, pPICZ, pGAPZ, pGAPZalph, pPIC9, pPIC3.5, pHIL-D2, pHIL-S1, pPIC3.5K, pPIC9K, and PA0815 (all available from Invitrogen, Carlbad, Calif.). Other suitable vectors will be readily apparent to the skilled artisan.

[0179] Vectors which use glutamine synthase (GS) or DHFR as the selectable markers can be amplified in the presence of the drugs methionine sulphoximine or methotrexate, respectively. An advantage of glutamine synthase based vectors are the availabilty of cell lines (e.g., the murine myeloma cell line, NS0) which are glutamine synthase negative. Glutamine synthase expression systems can also function in glutamine synthase expressing cells (e.g., Chinese Hamster Ovary (CHO) cells) by providing additional inhibitor to prevent the functioning of the endogenous gene. A glutamine synthase expression system and components thereof are detailed in PCT publications: WO87/04462; WO86/05807; WO89/01036; WO89/10404; and WO91/06657, which are hereby incorporated in their entireties by reference herein. Additionally, glutamine synthase expression vectors can be obtained from Lonza Biologics, Inc. (Portsmouth, N.H.). Expression and production of monoclonal antibodies using a GS expression system in murine myeloma cells is described in Bebbington et al., Bio/technology 10:169(1992) and in Biblia and Robinson Biotechnol. Prog. 11:1 (1995) which are herein incorporated by reference.

[0180] The present invention also relates to host cells containing the above-described vector constructs described herein, and additionally encompasses host cells containing nucleotide sequences of the invention that are operably associated with one or more heterologous control regions (e.g., promoter and/or enhancer) using techniques known of in the art. The host cell can be a higher eukaryotic cell, such as a mammalian cell (e.g., a human derived cell), or a lower eukaryotic cell, such as a yeast cell, or the host cell can be a prokaryotic cell, such as a bacterial cell. A host strain may be chosen which modulates the expression of the inserted gene sequences, or modifies and processes the gene product in the specific fashion desired. Expression from certain promoters can be elevated in the presence of certain inducers; thus expression of the genetically engineered polypeptide may be controlled. Furthermore, different host cells have characteristics and specific mechanisms for the translational and post-translational processing and modification (e.g., phosphorylation, cleavage) of proteins. Appropriate cell lines can be chosen to ensure the desired modifications and processing of the foreign protein expressed.

[0181] Introduction of the nucleic acids and nucleic acid constructs of the invention into the host cell can be effected by calcium phosphate transfection, DEAE-dextran mediated transfection, cationic lipid-mediated transfection, electroporation, transduction, infection, or other methods. Such methods are described in many standard laboratory manuals, such as Davis et al., Basic Methods In Molecular Biology (1986). It is specifically contemplated that the polypeptides of the present invention may in fact be expressed by a host cell lacking a recombinant vector.

[0182] In addition to encompassing host cells containing the vector constructs discussed herein, the invention also encompasses primary, secondary, and immortalized host cells of vertebrate origin, particularly mammalian origin, that have been engineered to delete or replace endogenous genetic material (e.g., the coding sequence), and/or to include genetic material (e.g., heterologous polynucleotide sequences) that is operably associated with polynucleotides of the invention, and which activates, alters, and/or amplifies endogenous polynucleotides. For example, techniques known in the art may be used to operably associate heterologous control regions (e.g., promoter and/or enhancer) and endogenous polynucleotide sequences via homologous recombination (see, e.g., U.S. Pat. No. 5,641,670, issued Jun. 24, 1997; International Publication Number WO 96/29411; International Publication Number WO 94/12650; Koller et al., Proc. Natl. Acad. Sci. USA 86:8932-8935 (1989); and Zijlstra et al., Nature 342:435-438 (1989), the disclosures of each of which are incorporated by reference in their entireties).

[0183] Polypeptides of the invention can be recovered and purified from recombinant cell cultures by well-known methods including ammonium sulfate or ethanol precipitation, acid extraction, anion or cation exchange chromatography, phosphocellulose chromatography, hydrophobic interaction chromatography, affinity chromatography, hydroxylapatite chromatography and lectin chromatography. Most preferably, high performance liquid chromatography (“HPLC”) is employed for purification.

[0184] Polypeptides of the present invention can also be recovered from: products purified from natural sources, including bodily fluids, tissues and cells, whether directly isolated or cultured; products of chemical synthetic procedures; and products produced by recombinant techniques from a prokaryotic or eukaryotic host, including, for example, bacterial, yeast, higher plant, insect, and mammalian cells. Depending upon the host employed in a recombinant production procedure, the polypeptides of the present invention may be glycosylated or may be non-glycosylated. In addition, polypeptides of the invention may also include an initial modified methionine residue, in some cases as a result of host-mediated processes. Thus, it is well known in the art that the N-terminal methionine encoded by the translation initiation codon generally is removed with high efficiency from any protein after translation in all eukaryotic cells. While the N-terminal methionine on most proteins also is efficiently removed in most prokaryotes, for some proteins, this prokaryotic removal process is inefficient, depending on the nature of the amino acid to which the N-terminal methionine is covalently linked.

[0185] In one embodiment, the yeast Pichia pastoris is used to express polypeptides of the invention in a eukaryotic system. Pichia pastoris is a methylotrophic yeast which can metabolize methanol as its sole carbon source. A main step in the methanol metabolization pathway is the oxidation of methanol to formaldehyde using O₂. This reaction is catalyzed by the enzyme alcohol oxidase. In order to metabolize methanol as its sole carbon source, Pichia pastoris must generate high levels of alcohol oxidase due, in part, to the relatively low affinity of alcohol oxidase for O₂. Consequently, in a growth medium depending on methanol as a main carbon source, the promoter region of one of the two alcohol oxidase genes (AOX1) is highly active. In the presence of methanol, alcohol oxidase produced from the AOX1 gene comprises up to approximately 30% of the total soluble protein in Pichia pastoris. See Ellis, S. B., et al., Mol. Cell. Biol. 5:1111-21 (1985); Koutz, P. J, et al., Yeast 5:167-77 (1989); Tschopp, J. F., et al., Nucl. Acids Res. 15:3859-76 (1987). Thus, a heterologous coding sequence, such as, for example, a polynucleotide of the present invention, under the transcriptional regulation of all or part of the AOX1 regulatory sequence is expressed at exceptionally high levels in Pichia yeast grown in the presence of methanol.

[0186] In one example, the plasmid vector pPIC9K is used to express DNA encoding a polypeptide of the invention, as set forth herein, in a Pichea yeast system essentially as described in “Pichia Protocols: Methods in Molecular Biology,” D. R. Higgins and J. Cregg, eds. The Humana Press, Totowa, N.J., 1998. This expression vector allows expression and secretion of a polypeptide of the invention by virtue of the strong AOX1 promoter linked to the Pichia pastoris alkaline phosphatase (PHO) secretory signal peptide (i.e., leader) located upstream of a multiple cloning site.

[0187] Many other yeast vectors could be used in place of pPIC9K, such as, pYES2, pYD1, pTEF1/Zeo, pYES2/GS, pPICZ, pGAPZ, pGAPZalpha, pPIC9, pPIC3.5, pHIL-D2, pHIL-S1, pPIC3.5K, and PAO815, as one skilled in the art would readily appreciate, as long as the proposed expression construct provides appropriately located signals for transcription, translation, secretion (if desired), and the like, including an in-frame AUG as required.

[0188] In another embodiment, high-level expression of a heterologous coding sequence, such as, for example, a polynucleotide of the present invention, may be achieved by cloning the heterologous polynucleotide of the invention into an expression vector such as, for example, pGAPZ or pGAPZalpha, and growing the yeast culture in the absence of methanol.

[0189] In addition to encompassing host cells containing the vector constructs discussed herein, the invention also encompasses primary, secondary, and immortalized host cells of vertebrate origin, particularly mammalian origin, that have been engineered to delete or replace endogenous genetic material (e.g., coding sequence), and/or to include genetic material (e.g., heterologous polynucleotide sequences) that is operably associated with polynucleotides of the invention, and which activates, alters, and/or amplifies endogenous polynucleotides. For example, techniques known in the art may be used to operably associate heterologous control regions (e.g., promoter and/or enhancer) and endogenous polynucleotide sequences via homologous recombination (see, e.g., U.S. Pat. No. 5,641,670, issued Jun. 24, 1997; International Publication No. WO 96/29411, published Sep. 26, 1996; International Publication No. WO 94/12650, published Aug. 4, 1994; Koller et al., Proc. Natl. Acad. Sci. USA 86:8932-8935 (1989); and Zijlstra et al., Nature 342:435-438 (1989), the disclosures of each of which are incorporated by reference in their entireties).

[0190] In addition, polypeptides of the invention can be chemically synthesized using techniques known in the art (e.g., see Creighton, 1983, Proteins: Structures and Molecular Principles, W. H. Freeman & Co., N.Y., and Hunkapiller et al., Nature, 310:105-111 (1984)). For example, a polypeptide corresponding to a fragment of a polypeptide can be synthesized by use of a peptide synthesizer. Furthermore, if desired, nonclassical amino acids or chemical amino acid analogs can be introduced as a substitution or addition into the polypeptide sequence. Non-classical amino acids include, but are not limited to, to the D-isomers of the common amino acids, 2,4-diaminobutyric acid, a-amino isobutyric acid, 4-aminobutyric acid, Abu, 2-amino butyric acid, g-Abu, e-Ahx, 6-amino hexanoic acid, Aib, 2-amino isobutyric acid, 3-amino propionic acid, omithine, norleucine, norvaline, hydroxyproline, sarcosine, citrulline, homocitrulline, cysteic acid, t-butylglycine, t-butylalanine, phenylglycine, cyclohexylalanine, b-alanine, fluoro-amino acids, designer amino acids such as b-methyl amino acids, Ca-methyl amino acids, Na-methyl amino acids, and amino acid analogs in general. Furthermore, the amino acid can be D (dextrorotary) or L (levorotary).

[0191] The invention encompasses polypeptides of the present invention which are differentially modified during or after translation, e.g., by glycosylation, acetylation, phosphorylation, amidation, derivatization by known protecting/blocking groups, proteolytic cleavage, linkage to an antibody molecule or other cellular ligand, etc. Any of numerous chemical modifications may be carried out by known techniques, including but not limited, to specific chemical cleavage by cyanogen bromide, trypsin, chymotrypsin, papain, V8 protease, NaBH₄; acetylation, formylation, oxidation, reduction; metabolic synthesis in the presence of tunicamycin; etc.

[0192] Additional post-translational modifications encompassed by the invention include, for example, e.g., N-linked or O-linked carbohydrate chains, processing of N-terminal or C-terminal ends), attachment of chemical moieties to the amino acid backbone, chemical modifications of N-linked or O-linked carbohydrate chains, and addition or deletion of an N-terminal methionine residue as a result of procaryotic host cell expression. The polypeptides may also be modified with a detectable label, such as an enzymatic, fluorescent, isotopic or affinity label to allow for detection and isolation of the protein.

[0193] Examples of suitable enzymes include horseradish peroxidase, alkaline phosphatase, beta-galactosidase, or acetylcholinesterase; examples of suitable prosthetic group complexes include streptavidin/biotin and avidin/biotin; examples of suitable fluorescent materials include umbelliferone, fluorescein, fluorescein isothiocyanate, rhodamine, dichlorotriazinylamine fluorescein, dansyl chloride or phycoerythrin; an example of a luminescent material includes luminol; examples of bioluminescent materials include luciferase, luciferin, and aequorin; and examples of suitable radioactive material include iodine (¹²¹I, ¹²³I, ¹²⁵I, ¹³¹I), carbon (¹⁴C), sulfur (³⁵S), tritium (³H), indium (¹¹¹In, ¹¹²In, ^{113m}In, ^{115m}In), technetium (⁹⁹Tc, ^{99m}Tc), thallium (²⁰¹Ti), gallium (⁶⁸Ga, ⁶⁷Ga), palladium (¹⁰³Pd), molybdenum (⁹⁹Mo), xenon (¹³³Xe), fluorine (¹⁸F), ¹⁵³Sm, ¹⁷⁷Lu, ¹⁵⁹Gd, ¹⁴⁹Pm, ¹⁴⁰La, ¹⁷⁵Yb, ¹⁶⁶Ho, ⁹⁰Y, ⁴⁷Sc, ¹⁸⁶Re, ¹⁸⁸Re, ¹⁴²Pr, ¹⁰⁵Rh, and ⁹⁷Ru.

[0194] In specific embodiments, a polypeptide of the present invention or fragment or variant thereof is attached to macrocyclic chelators that associate with radiometal ions, including but not limited to, ¹⁷⁷Lu, ⁹⁰Y, ¹⁶⁶Ho, and ¹⁵³Sm, to polypeptides. In a preferred embodiment, the radiometal ion associated with the macrocyclic chelators is ¹¹¹In. In another preferred embodiment, the radiometal ion associated with the macrocyclic chelator is ⁹⁰Y. In specific embodiments, the macrocyclic chelator is 1,4,7,10-tetraazacyclododecane-N,N′,N″,N′″-tetraacetic acid (DOTA). In other specific embodiments, DOTA is attached to an antibody of the invention or fragment thereof via a linker molecule. Examples of linker molecules useful for conjugating DOTA to a polypeptide are commonly known in the art—see, for example, DeNardo et al., Clin Cancer Res. 4(10):2483-90 (1998); Peterson et al., Bioconjug. Chem. 10(4):553-7 (1999); and Zimmerman et al, Nucl. Med. Biol. 26(8):943-50 (1999); which are hereby incorporated by reference in their entirety.

[0195] As mentioned, the proteins of the invention may be modified by either natural processes, such as posttranslational processing, or by chemical modification techniques which are well known in the art. It will be appreciated that the same type of modification may be present in the same or varying degrees at several sites in a given polypeptide. Polypeptides of the invention may be branched, for example, as a result of ubiquitination, and they may be cyclic, with or without branching. Cyclic, branched, and branched cyclic polypeptides may result from posttranslation natural processes or may be made by synthetic methods. Modifications include acetylation, acylation, ADP-ribosylation, amidation, covalent attachment of flavin, covalent attachment of a heme moiety, covalent attachment of a nucleotide or nucleotide derivative, covalent attachment of a lipid or lipid derivative, covalent attachment of phosphotidylinositol, cross-linking, cyclization, disulfide bond formation, demethylation, formation of covalent cross-links, formation of cysteine, formation of pyroglutamate, formylation, gamma-carboxylation, glycosylation, GPI anchor formation, hydroxylation, iodination, methylation, myristoylation, oxidation, pegylation, proteolytic processing, phosphorylation, prenylation, racemization, selenoylation, sulfation, transfer-RNA mediated addition of amino acids to proteins such as arginylation, and ubiquitination. (See, for instance, PROTEINS—STRUCTURE AND MOLECULAR PROPERTIES, 2nd Ed., T. E. Creighton, W. H. Freeman and Company, New York (1993); POSTTRANSLATIONAL COVALENT MODIFICATION OF PROTEINS, B. C. Johnson, Ed., Academic Press, New York, pgs. 1-12 (1983); Seifter et al., Meth. Enzymol. 182:626-646 (1990); Rattan et al., Ann. N.Y. Acad. Sci. 663:48-62 (1992)).

[0196] Also provided by the invention are chemically modified derivatives of the polypeptides of the invention which may provide additional advantages such as increased solubility, stability and circulating time of the polypeptide, or decreased immunogenicity (see U.S. Pat. No. 4,179,337). The chemical moieties for derivitization may be selected from water soluble polymers such as polyethylene glycol, ethylene glycol/propylene glycol copolymers, carboxymethylcellulose, dextran, polyvinyl alcohol and the like. The polypeptides may be modified at random positions within the molecule, or at predetermined positions within the molecule and may include one, two, three or more attached chemical moieties.

[0197] The polymer may be of any molecular weight, and may be branched or unbranched. For polyethylene glycol, the preferred molecular weight is between about 1 kDa and about 100 kDa (the term “about” indicating that in preparations of polyethylene glycol, some molecules will weigh more, some less, than the stated molecular weight) for ease in handling and manufacturing. Other sizes may be used, depending on the desired therapeutic profile (e.g., the duration of sustained release desired, the effects, if any on biological activity, the ease in handling, the degree or lack of antigenicity and other known effects of the polyethylene glycol to a therapeutic protein or analog). For example, the polyethylene glycol may have an average molecular weight of about 200, 500, 1000, 1500, 2000, 2500, 3000, 3500, 4000, 4500, 5000, 5500, 6000, 6500, 7000, 7500, 8000, 8500, 9000, 9500, 10,000, 10,500, 11,000, 11,500, 12,000, 12,500, 13,000, 13,500, 14,000, 14,500, 15,000, 15,500, 16,000, 16,500, 17,000, 17,500, 18,000, 18,500, 19,000, 19,500, 20,000, 25,000, 30,000, 35,000, 40,000, 45,000, 50,000, 55,000, 60,000, 65,000, 70,000, 75,000, 80,000, 85,000, 90,000, 95,000, or 100,000 kDa.

[0198] As noted above, the polyethylene glycol may have a branched structure. Branched polyethylene glycols are described, for example, in U.S. Pat. No. 5,643,575; Morpurgo et al., Appl. Biochem. Biotechnol. 56:59-72 (1996); Vorobjev et al., Nucleosides Nucleotides 18:2745-2750 (1999); and Caliceti et al., Bioconjug. Chem. 10:638-646 (1999), the disclosures of each of which are incorporated herein by reference.

[0199] The polyethylene glycol molecules (or other chemical moieties) should be attached to the protein with consideration of effects on functional or antigenic domains of the protein. There are a number of attachment methods available to those skilled in the art, such as, for example, the method disclosed in EP 0 401 384 (coupling PEG to G-CSF), herein incorporated by reference; see also Malik et al., Exp. Hematol. 20:1028-1035 (1992), reporting pegylation of GM-CSF using tresyl chloride. For example, polyethylene glycol may be covalently bound through amino acid residues via a reactive group, such as a free amino or carboxyl group. Reactive groups are those to which an activated polyethylene glycol molecule may be bound. The amino acid residues having a free amino group may include lysine residues and the N-terminal amino acid residues; those having a free carboxyl group may include aspartic acid residues glutamic acid residues and the C-terminal amino acid residue. Sulfhydryl groups may also be used as a reactive group for attaching the polyethylene glycol molecules. Preferred for therapeutic purposes is attachment at an amino group, such as attachment at the N-terminus or lysine group.

[0200] As suggested above, polyethylene glycol may be attached to proteins via linkage to any of a number of amino acid residues. For example, polyethylene glycol can be linked to proteins via covalent bonds to lysine, histidine, aspartic acid, glutamic acid, or cysteine residues. One or more reaction chemistries may be employed to attach polyethylene glycol to specific amino acid residues (e.g., lysine, histidine, aspartic acid, glutamic acid, or cysteine) of the protein or to more than one type of amino acid residue (e.g., lysine, histidine, aspartic acid, glutamic acid, cysteine and combinations thereof) of the protein.

[0201] One may specifically desire proteins chemically modified at the N-terminus. Using polyethylene glycol as an illustration of the present composition, one may select from a variety of polyethylene glycol molecules (by molecular weight, branching, etc.), the proportion of polyethylene glycol molecules to protein (polypeptide) molecules in the reaction mix, the type of pegylation reaction to be performed, and the method of obtaining the selected N-terminally pegylated protein. The method of obtaining the N-terminally pegylated preparation (i.e., separating this moiety from other monopegylated moieties if necessary) may be by purification of the N-terminally pegylated material from a population of pegylated protein molecules. Selective proteins chemically modified at the N-terminus modification may be accomplished by reductive alkylation which exploits differential reactivity of different types of primary amino groups (lysine versus the N-terminal) available for derivatization in a particular protein. Under the appropriate reaction conditions, substantially selective derivatization of the protein at the N-terminus with a carbonyl group containing polymer is achieved.

[0202] As indicated above, pegylation of the proteins of the invention may be accomplished by any number of means. For example, polyethylene glycol may be attached to the protein either directly or by an intervening linker. Linkerless systems for attaching polyethylene glycol to proteins are described in Delgado et al., Crit. Rev. Thera. Drug Carrier Sys. 9:249-304 (1992); Francis et al., Intern. J. of Hematol. 68:1-18 (1998); U.S. Pat. No. 4,002,531; U.S. Pat. No. 5,349,052; WO 95/06058; and WO 98/32466, the disclosures of each of which are incorporated herein by reference.

[0203] One system for attaching polyethylene glycol directly to amino acid residues of proteins without an intervening linker employs tresylated MPEG, which is produced by the modification of monmethoxy polyethylene glycol (MPEG) using tresylchloride (ClSO₂CH₂CF₃). Upon reaction of protein with tresylated MPEG, polyethylene glycol is directly attached to amine groups of the protein. Thus, the invention includes protein-polyethylene glycol conjugates produced by reacting proteins of the invention with a polyethylene glycol molecule having a 2,2,2-trifluoreothane sulphonyl group.

[0204] Polyethylene glycol can also be attached to proteins using a number of different intervening linkers. For example, U.S. Pat. No. 5,612,460, the entire disclosure of which is incorporated herein by reference, discloses urethane linkers for connecting polyethylene glycol to proteins. Protein-polyethylene glycol conjugates wherein the polyethylene glycol is attached to the protein by a linker can also be produced by reaction of proteins with compounds such as MPEG-succinimidylsuccinate, MPEG activated with 1,1′-carbonyldiimidazole, MPEG-2,4,5-trichloropenylcarbonate, MPEG-p-nitrophenolcarbonate, and various MPEG-succinate derivatives. A number of additional polyethylene glycol derivatives and reaction chemistries for attaching polyethylene glycol to proteins are described in International Publication No. WO 98/32466, the entire disclosure of which is incorporated herein by reference. Pegylated protein products produced using the reaction chemistries set out herein are included within the scope of the invention.

[0205] The number of polyethylene glycol moieties attached to each protein of the invention (i.e., the degree of substitution) may also vary. For example, the pegylated proteins of the invention may be linked, on average, to 1, 2, 3, 4, 5, 6, 7, 8, 9, 10, 12, 15, 17, 20, or more polyethylene glycol molecules. Similarly, the average degree of substitution within ranges such as 1-3,2-4, 3-5,4-6, 5-7,6-8, 7-9,8-10, 9-11, 10-12, 11-13, 12-14, 13-15, 14-16, 15-17, 16-18, 17-19, or 18-20 polyethylene glycol moieties per protein molecule. Methods for determining the degree of substitution are discussed, for example, in Delgado et al., Crit. Rev. Thera. Drug Carrier Sys. 9:249-304 (1992).

[0206] The polypeptides of the invention can be recovered and purified from chemical synthesis and recombinant cell cultures by standard methods which include, but are not limited to, ammonium sulfate or ethanol precipitation, acid extraction, anion or cation exchange chromatography, phosphocellulose chromatography, hydrophobic interaction chromatography, affinity chromatography, hydroxylapatite chromatography and lectin chromatography. Most preferably, high performance liquid chromatography (“HPLC”) is employed for purification. Well known techniques for refolding protein may be employed to regenerate active conformation when the polypeptide is denatured during isolation and/or purification.

[0207] The polypeptides of the invention may be in monomers or multimers (i.e., dimers, trimers, tetramers and higher multimers). Accordingly, the present invention relates to monomers and multimers of the polypeptides of the invention, their preparation, and compositions (preferably, Therapeutics) containing them. In specific embodiments, the polypeptides of the invention are monomers, dimers, trimers or tetramers. In additional embodiments, the multimers of the invention are at least dimers, at least trimers, or at least tetramers.

[0208] Multimers encompassed by the invention may be homomers or heteromers. As used herein, the term homomer refers to a multimer containing only polypeptides corresponding to a protein of the invention (e.g., the amino acid sequence of SEQ ID NO:Y, an amino acid sequence encoded by SEQ ID NO:X or the complement of SEQ ID NO:X, the amino acid sequence encoded by the portion of SEQ ID NO:X as defined in columns 8 and 9 of Table 2, and/or an amino acid sequence encoded by cDNA contained in Clone ID NO:Z (including fragments, variants, splice variants, and fusion proteins, corresponding to these as described herein)). These homomers may contain polypeptides having identical or different amino acid sequences. In a specific embodiment, a homomer of the invention is a multimer containing only polypeptides having an identical amino acid sequence. In another specific embodiment, a homomer of the invention is a multimer containing polypeptides having different amino acid sequences. In specific embodiments, the multimer of the invention is a homodimer (e.g., containing two polypeptides having identical or different amino acid sequences) or a homotrimer (e.g., containing three polypeptides having identical and/or different amino acid sequences). In additional embodiments, the homomeric multimer of the invention is at least a homodimer, at least a homotrimer, or at least a homotetramer.

[0209] As used herein, the term heteromer refers to a multimer containing one or more heterologous polypeptides (i.e., polypeptides of different proteins) in addition to the polypeptides of the invention. In a specific embodiment, the multimer of the invention is a heterodimer, a heterotrimer, or a heterotetramer. In additional embodiments, the heteromeric multimer of the invention is at least a heterodimer, at least a heterotrimer, or at least a heterotetramer.

[0210] Multimers of the invention may be the result of hydrophobic, hydrophilic, ionic and/or covalent associations and/or may be indirectly linked by, for example, liposome formation. Thus, in one embodiment, multimers of the invention, such as, for example, homodimers or homotrimers, are formed when polypeptides of the invention contact one another in solution. In another embodiment, heteromultimers of the invention, such as, for example, heterotrimers or heterotetramers, are formed when polypeptides of the invention contact antibodies to the polypeptides of the invention (including antibodies to the heterologous polypeptide sequence in a fusion protein of the invention) in solution. In other embodiments, multimers of the invention are formed by covalent associations with and/or between the polypeptides of the invention. Such covalent associations may involve one or more amino acid residues contained in the polypeptide sequence (e.g., that recited in SEQ ID NO:Y, encoded by the portion of SEQ ID NO:X as defined in columns 8 and 9 of Table 2, and/or encoded by the cDNA contained in Clone ID NO:Z). In one instance, the covalent associations are cross-linking between cysteine residues located within the polypeptide sequences which interact in the native (i.e., naturally occurring) polypeptide. In another instance, the covalent associations are the consequence of chemical or recombinant manipulation. Alternatively, such covalent associations may involve one or more amino acid residues contained in the heterologous polypeptide sequence in a fusion protein. In one example, covalent associations are between the heterologous sequence contained in a fusion protein of the invention (see, e.g., U.S. Pat. No. 5,478,925). In a specific example, the covalent associations are between the heterologous sequence contained in a Fe fusion protein of the invention (as described herein). In another specific example, covalent associations of fusion proteins of the invention are between heterologous polypeptide sequence from another protein that is capable of forming covalently associated multimers, such as for example, osteoprotegerin (see, e.g., International Publication NO: WO 98/49305, the contents of which are herein incorporated by reference in its entirety). In another embodiment, two or more polypeptides of the invention are joined through peptide linkers. Examples include those peptide linkers described in U.S. Pat. No. 5,073,627 (hereby incorporated by reference). Proteins comprising multiple polypeptides of the invention separated by peptide linkers may be produced using conventional recombinant DNA technology.

[0211] Another method for preparing multimer polypeptides of the invention involves use of polypeptides of the invention fused to a leucine zipper or isoleucine zipper polypeptide sequence. Leucine zipper and isoleucine zipper domains are polypeptides that promote multimerization of the proteins in which they are found. Leucine zippers were originally identified in several DNA-binding proteins (Landschulz et al., Science 240:1759, (1988)), and have since been found in a variety of different proteins. Among the known leucine zippers are naturally occurring peptides and derivatives thereof that dimerize or trimerize. Examples of leucine zipper domains suitable for producing soluble multimeric proteins of the invention are those described in PCT application WO 94/10308, hereby incorporated by reference. Recombinant fusion proteins comprising a polypeptide of the invention fused to a polypeptide sequence that dimerizes or trimerizes in solution are expressed in suitable host cells, and the resulting soluble multimeric fusion protein is recovered from the culture supernatant using techniques known in the art.

[0212] Trimeric polypeptides of the invention may offer the advantage of enhanced biological activity. Preferred leucine zipper moieties and isoleucine moieties are those that preferentially form trimers. One example is a leucine zipper derived from lung surfactant protein D (SPD), as described in Hoppe et al. (FEBS Letters 344:191, (1994)) and in U.S. patent application Ser. No. 08/446,922, hereby incorporated by reference. Other peptides derived from naturally occurring trimeric proteins may be employed in preparing trimeric polypeptides of the invention.

[0213] In another example, proteins of the invention are associated by interactions between Flag® polypeptide sequence contained in fusion proteins of the invention containing Flag® polypeptide sequence. In a further embodiment, proteins of the invention are associated by interactions between heterologous polypeptide sequence contained in Flag® fusion proteins of the invention and anti-Flag® antibody.

[0214] The multimers of the invention may be generated using chemical techniques known in the art. For example, polypeptides desired to be contained in the multimers of the invention may be chemically cross-linked using linker molecules and linker molecule length optimization techniques known in the art (see, e.g., U.S. Pat. No. 5,478,925, which is herein incorporated by reference in its entirety). Additionally, multimers of the invention may be generated using techniques known in the art to form one or more inter-molecule cross-links between the cysteine residues located within the sequence of the polypeptides desired to be contained in the multimer (see, e.g., U.S. Pat. No. 5,478,925, which is herein incorporated by reference in its entirety). Further, polypeptides of the invention may be routinely modified by the addition of cysteine or biotin to the C-terminus or N-terminus of the polypeptide and techniques known in the art may be applied to generate multimers containing one or more of these modified polypeptides (see, e.g., U.S. Pat. No. 5,478,925, which is herein incorporated by reference in its entirety). Additionally, techniques known in the art may be applied to generate liposomes containing the polypeptide components desired to be contained in the multimer of the invention (see, e.g., U.S. Pat. No. 5,478,925, which is herein incorporated by reference in its entirety).

[0215] Alternatively, multimers of the invention may be generated using genetic engineering techniques known in the art. In one embodiment, polypeptides contained in multimers of the invention are produced recombinantly using fusion protein technology described herein or otherwise known in the art (see, e.g., U.S. Pat. No. 5,478,925, which is herein incorporated by reference in its entirety). In a specific embodiment, polynucleotides coding for a homodimer of the invention are generated by ligating a polynucleotide sequence encoding a polypeptide of the invention to a sequence encoding a linker polypeptide and then further to a synthetic polynucleotide encoding the translated product of the polypeptide in the reverse orientation from the original C-terminus to the N-terminus (lacking the leader sequence) (see, e.g., U.S. Pat. No. 5,478,925, which is herein incorporated by reference in its entirety). In another embodiment, recombinant techniques described herein or otherwise known in the art are applied to generate recombinant polypeptides of the invention which contain a transmembrane domain (or hydrophobic or signal peptide) and which can be incorporated by membrane reconstitution techniques into liposomes (see, e.g., U.S. Pat. No. 5,478,925, which is herein incorporated by reference in its entirety).

[0216] Antibodies

[0217] Further polypeptides of the invention relate to antibodies and T-cell antigen receptors (TCR) which immunospecifically bind a polypeptide, polypeptide fragment, or variant of the invention (e.g., a polypeptide or fragment or variant of the amino acid sequence of SEQ ID NO:Y or a polypeptide encoded by the cDNA contained in Clone ID No:Z, and/or an epitope, of the present invention) as determined by immunoassays well known in the art for assaying specific antibody-antigen binding. Antibodies of the invention include, but are not limited to, polyclonal, monoclonal, multispecific, human, humanized or chimeric antibodies, single chain antibodies, Fab fragments, F(ab′) fragments, fragments produced by a Fab expression library, anti-idiotypic (anti-Id) antibodies (including, e.g., anti-Id antibodies to antibodies of the invention), intracellularly-made antibodies (i.e., intrabodies), and epitope-binding fragments of any of the above. The term “antibody,” as used herein, refers to immunoglobulin molecules and immunologically active portions of immunoglobulin molecules, i.e., molecules that contain an antigen binding site that immunospecifically binds an antigen. The immunoglobulin molecules of the invention can be of any type (e.g., IgG, IgE, IgM, IgD, IgA and IgY), class (e.g., IgG1, IgG2, IgG3, IgG4, IgA1 and IgA2) or subclass of immunoglobulin molecule. In preferred embodiments, the immunoglobulin molecules of the invention are IgG1. In other preferred embodiments, the immunoglobulin molecules of the invention are IgG4.

[0218] Most preferably the antibodies are human antigen-binding antibody fragments of the present invention and include, but are not limited to, Fab, Fab′ and F(ab′)₂, Fd, single-chain Fvs (scFv), single-chain antibodies, disulfide-linked Fvs (sdFv) and fragments comprising either a VL or VH domain. Antigen-binding antibody fragments, including single-chain antibodies, may comprise the variable region(s) alone or in combination with the entirety or a portion of the following: hinge region, CH1, CH2, and CH3 domains. Also included in the invention are antigen-binding fragments also comprising any combination of variable region(s) with a hinge region, CH1, CH2, and CH3 domains. The antibodies of the invention may be from any animal origin including birds and mammals. Preferably, the antibodies are human, murine (e.g., mouse and rat), donkey, ship rabbit, goat, guinea pig, camel, horse, or chicken. As used herein, “human” antibodies include antibodies having the amino acid sequence of a human immunoglobulin and include antibodies isolated from human immunoglobulin libraries or from animals transgenic for one or more human immunoglobulin and that do not express endogenous immunoglobulins, as described infra and, for example in, U.S. Pat. No. 5,939,598 by Kucherlapati et al.

[0219] The antibodies of the present invention may be monospecific, bispecific, trispecific or of greater multispecificity. Multispecific antibodies may be specific for different epitopes of a polypeptide of the present invention or may be specific for both a polypeptide of the present invention as well as for a heterologous epitope, such as a heterologous polypeptide or solid support material. See, e.g., PCT publications WO 93/17715; WO 92/08802; WO 91/00360; WO 92/05793; Tutt, et al., J. Immunol. 147:60-69 (1991); U.S. Pat. Nos. 4,474,893; 4,714,681; 4,925,648; 5,573,920; 5,601,819; Kostelny et al., J. Immunol. 148:1547-1553 (1992).

[0220] Antibodies of the present invention may be described or specified in terms of the epitope(s) or portion(s) of a polypeptide of the present invention which they recognize or specifically bind. The epitope(s) or polypeptide portion(s) may be specified as described herein, e.g., by N-terminal and C-terminal positions, or by size in contiguous amino acid residues, or listed in the Tables and Figures. Preferred epitopes of the invention include the predicted epitopes shown in column 7 of Table 1A, as well as polynucleotides that encode these epitopes. Antibodies which specifically bind any epitope or polypeptide of the present invention may also be excluded. Therefore, the present invention includes antibodies that specifically bind polypeptides of the present invention, and allows for the exclusion of the same.

[0221] Antibodies of the present invention may also be described or specified in terms of their cross-reactivity. Antibodies that do not bind any other analog, ortholog, or homolog of a polypeptide of the present invention are included. Antibodies that bind polypeptides with at least 95%, at least 90%, at least 85%, at least 80%, at least 75%, at least 70%, at least 65%, at least 60%, at least 55%, and at least 50% identity (as calculated using methods known in the art and described herein) to a polypeptide of the present invention are also included in the present invention. In specific embodiments, antibodies of the present invention cross-react with murine, rat and/or rabbit homologs of human proteins and the corresponding epitopes thereof. Antibodies that do not bind polypeptides with less than 95%, less than 90%, less than 85%, less than 80%, less than 75%, less than 70%, less than 65%, less than 60%, less than 55%, and less than 50% identity (as calculated using methods known in the art and described herein) to a polypeptide of the present invention are also included in the present invention. In a specific embodiment, the above-described cross-reactivity is with respect to any single specific antigenic or immunogenic polypeptide, or combination(s) of 2, 3, 4, 5, or more of the specific antigenic and/or immunogenic polypeptides disclosed herein. Further included in the present invention are antibodies which bind polypeptides encoded by polynucleotides which hybridize to a polynucleotide of the present invention under stringent hybridization conditions (as described herein). Antibodies of the present invention may also be described or specified in terms of their binding affinity to a polypeptide of the invention. Preferred binding affinities include those with a dissociation constant or Kd less than 5×10⁻² M, 10⁻² M, 5×10⁻³ M, 10⁻³ M, 5×10⁻⁻⁴ M, 10⁻⁴ M, 5×10⁻⁵ M, 10⁻⁵ M, 5×10⁻⁶ M, 10⁻⁶M, 5×10⁻⁷ M, 10⁷ M, 5×10⁻⁸ M, 10⁻⁸ M, 5×10⁻⁹ M, 10⁻⁹ M, 5×10⁻¹⁰ M, 10⁻¹⁰ M, 5×10⁻¹¹ M, 10⁻¹¹ M, 5×10⁻¹² M, 10⁻¹² M, 5×10⁻¹³ M, 10⁻¹³ M, 5×10⁻¹⁴ M, 10⁻¹⁴ M, 5×10⁻¹⁵ M, or 10⁻¹⁵ M.

[0222] The invention also provides antibodies that competitively inhibit binding of an antibody to an epitope of the invention as determined by any method known in the art for determining competitive binding, for example, the immunoassays described herein. In preferred embodiments, the antibody competitively inhibits binding to the epitope by at least 95%, at least 90%, at least 85%, at least 80%, at least 75%, at least 70%, at least 60%, or at least 50%.

[0223] Antibodies of the present invention may act as agonists or antagonists of the polypeptides of the present invention. For example, the present invention includes antibodies which disrupt the receptor/ligand interactions with the polypeptides of the invention either partially or fully. Preferably, antibodies of the present invention bind an antigenic epitope disclosed herein, or a portion thereof. The invention features both receptor-specific antibodies and ligand-specific antibodies. The invention also features receptor-specific antibodies which do not prevent ligand binding but prevent receptor activation. Receptor activation (i.e., signaling) may be determined by techniques described herein or otherwise known in the art. For example, receptor activation can be determined by detecting the phosphorylation (e.g., tyrosine or serine/threonine) of the receptor or its substrate by immunoprecipitation followed by western blot analysis (for example, as described supra). In specific embodiments, antibodies are provided that inhibit ligand activity or receptor activity by at least 95%, at least 90%, at least 85%, at least 80%, at least 75%, at least 70%, at least 60%, or at least 50% of the activity in absence of the antibody.

[0224] The invention also features receptor-specific antibodies which both prevent ligand binding and receptor activation as well as antibodies that recognize the receptor-ligand complex, and, preferably, do not specifically recognize the unbound receptor or the unbound ligand. Likewise, included in the invention are neutralizing antibodies which bind the ligand and prevent binding of the ligand to the receptor, as well as antibodies which bind the ligand, thereby preventing receptor activation, but do not prevent the ligand from binding the receptor. Further included in the invention are antibodies which activate the receptor. These antibodies may act as receptor agonists, i.e., potentiate or activate either all or a subset of the biological activities of the ligand-mediated receptor activation, for example, by inducing dimerization of the receptor. The antibodies may be specified as agonists, antagonists or inverse agonists for biological activities comprising the specific biological activities of the peptides of the invention disclosed herein. The above antibody agonists can be made using methods known in the art. See, e.g., PCT publication WO 96/40281; U.S. Pat. No. 5,811,097; Deng et al., Blood 92(6):1981-1988 (1998); Chen et al., Cancer Res. 58(16):3668-3678 (1998); Harrop et al., J. Immunol. 161(4):1786-1794 (1998); Zhu et al., Cancer Res. 58(15):3209-3214 (1998); Yoon et al., J. Immunol. 160(7):3170-3179 (1998); Prat et al., J. Cell. Sci. 111(Pt2):237-247 (1998); Pitard et al., J. Immunol. Methods 205(2):177-190 (1997); Liautard et al., Cytokine 9(4):233-241 (1997); Carlson et al., J. Biol. Chem. 272(17):11295-11301 (1997); Taryman et al., Neuron 14(4):755-762 (1995); Muller et al., Structure 6(9):1153-1167 (1998); Bartunek et al., Cytokine 8(1):14-20 (1996) (which are all incorporated by reference herein in their entireties).

[0225] Antibodies of the present invention may be used, for example, to purify, detect, and target the polypeptides of the present invention, including both in vitro and in vivo diagnostic and therapeutic methods. For example, the antibodies have utility in immunoassays for qualitatively and quantitatively measuring levels of the polypeptides of the present invention in biological samples. See, e.g., Harlow et al., Antibodies: A Laboratory Manual, (Cold Spring Harbor Laboratory Press, 2nd ed. 1988); incorporated by reference herein in its entirety.

[0226] As discussed in more detail below, the antibodies of the present invention may be used either alone or in combination with other compositions. The antibodies may further be recombinantly fused to a heterologous polypeptide at the N- or C-terminus or chemically conjugated (including covalent and non-covalent conjugations) to polypeptides or other compositions. For example, antibodies of the present invention may be recombinantly fused or conjugated to molecules useful as labels in detection assays and effector molecules such as heterologous polypeptides, drugs, radionuclides, or toxins. See, e.g., PCT publications WO 92/08495; WO 91/14438; WO 89/12624; U.S. Pat. No. 5,314,995; and EP 396,387; the disclosures of which are incorporated herein by reference in their entireties.

[0227] The antibodies of the invention include derivatives that are modified, i.e, by the covalent attachment of any type of molecule to the antibody such that covalent attachment does not prevent the antibody from generating an anti-idiotypic response. For example, but not by way of limitation, the antibody derivatives include antibodies that have been modified, e.g., by glycosylation, acetylation, pegylation, phosphylation, amidation, derivatization by known protecting/blocking groups, proteolytic cleavage, linkage to a cellular ligand or other protein, etc. Any of numerous chemical modifications may be carried out by known techniques, including, but not limited to specific chemical cleavage, acetylation, formylation, metabolic synthesis of tunicamycin, etc. Additionally, the derivative may contain one or more non-classical amino acids.

[0228] The antibodies of the present invention may be generated by any suitable method known in the art. Polyclonal antibodies to an antigen-of-interest can be produced by various procedures well known in the art. For example, a polypeptide of the invention can be administered to various host animals including, but not limited to, rabbits, mice, rats, etc. to induce the production of sera containing polyclonal antibodies specific for the antigen. Various adjuvants may be used to increase the immunological response, depending on the host species, and include but are not limited to, Freund's (complete and incomplete), mineral gels such as aluminum hydroxide, surface active substances such as lysolecithin, pluronic polyols, polyanions, peptides, oil emulsions, keyhole limpet hemocyanins, dinitrophenol, and potentially useful human adjuvants such as BCG (bacille Calmette-Guerin) and corynebacterium parvum. Such adjuvants are also well known in the art.

[0229] Monoclonal antibodies can be prepared using a wide variety of techniques known in the art including the use of hybridoma, recombinant, and phage display technologies, or a combination thereof. For example, monoclonal antibodies can be produced using hybridoma techniques including those known in the art and taught, for example, in Harlow et al., Antibodies: A Laboratory Manual, (Cold Spring Harbor Laboratory Press, 2nd ed. 1988); Hammerling, et al., in: Monoclonal Antibodies and T-Cell Hybridomas 563-681 (Elsevier, N.Y., 1981) (said references incorporated by reference in their entireties). The term “monoclonal antibody” as used herein is not limited to antibodies produced through hybridoma technology. The term “monoclonal antibody” refers to an antibody that is derived from a single clone, including any eukaryotic, prokaryotic, or phage clone, and not the method by which it is produced.

[0230] Methods for producing and screening for specific antibodies using hybridoma technology are routine and well known in the art and are discussed in detail in the Examples. In a non-limiting example, mice can be immunized with a polypeptide of the invention or a cell expressing such peptide. Once an immune response is detected, e.g., antibodies specific for the antigen are detected in the mouse serum, the mouse spleen is harvested and splenocytes isolated. The splenocytes are then fused by well known techniques to any suitable myeloma cells, for example cells from cell line SP20 available from the ATCC. Hybridomas are selected and cloned by limited dilution. The hybridoma clones are then assayed by methods known in the art for cells that secrete antibodies capable of binding a polypeptide of the invention. Ascites fluid, which generally contains high levels of antibodies, can be generated by immunizing mice with positive hybridoma clones.

[0231] Accordingly, the present invention provides methods of generating monoclonal antibodies as well as antibodies produced by the method comprising culturing a hybridoma cell secreting an antibody of the invention wherein, preferably, the hybridoma is generated by fusing splenocytes isolated from a mouse immunized with an antigen of the invention with myeloma cells and then screening the hybridomas resulting from the fusion for hybridoma clones that secrete an antibody able to bind a polypeptide of the invention.

[0232] Another well known method for producing both polyclonal and monoclonal human B cell lines is transformation using Epstein Barr Virus (EBV). Protocols for generating EBV-transformed B cell lines are commonly known in the art, such as, for example, the protocol outlined in Chapter 7.22 of Current Protocols in Immunology, Coligan et al., Eds., 1994, John Wiley & Sons, NY, which is hereby incorporated in its entirety by reference. The source of B cells for transformation is commonly human peripheral blood, but B cells for transformation may also be derived from other sources including, but not limited to, lymph nodes, tonsil, spleen, tumor tissue, and infected tissues. Tissues are generally made into single cell suspensions prior to EBV transformation. Additionally, steps may be taken to either physically remove or inactivate T cells (e.g., by treatment with cyclosporin A) in B cell-containing samples, because T cells from individuals seropositive for anti-EBV antibodies can suppress B cell immortalization by EBV.

[0233] In general, the sample containing human B cells is innoculated with EBV, and cultured for 3-4 weeks. A typical source of EBV is the culture supernatant of the B95-8 cell line (ATCC #VR-1492). Physical signs of EBV transformation can generally be seen towards the end of the 3-4 week culture period. By phase-contrast microscopy, transformed cells may appear large, clear, hairy and tend to aggregate in tight clusters of cells. Initially, EBV lines are generally polyclonal. However, over prolonged periods of cell cultures, EBV lines may become monoclonal or polyclonal as a result of the selective outgrowth of particular B cell clones. Alternatively, polyclonal EBV transformed lines may be subcloned (e.g., by limiting dilution culture) or fused with a suitable fusion partner and plated at limiting dilution to obtain monoclonal B cell lines. Suitable fusion partners for EBV transformed cell lines include mouse myeloma cell lines (e.g., SP2/0, X63-Ag8.653), heteromyeloma cell lines (human x mouse; e.g, SPAM-8, SBC-H20, and CB-F7), and human cell lines (e.g., GM 1500, SKO-007, RPMI 8226, and KR-4). Thus, the present invention also provides a method of generating polyclonal or monoclonal human antibodies against polypeptides of the invention or fragments thereof, comprising EBV-transformation of human B cells.

[0234] Antibody fragments which recognize specific epitopes may be generated by known techniques. For example, Fab and F(ab′)2 fragments of the invention may be produced by proteolytic cleavage of immunoglobulin molecules, using enzymes such as papain (to produce Fab fragments) or pepsin (to produce F(ab′)2 fragments). F(ab′)2 fragments contain the variable region, the light chain constant region and the CH1 domain of the heavy chain.

[0235] For example, the antibodies of the present invention can also be generated using various phage display methods known in the art. In phage display methods, functional antibody domains are displayed on the surface of phage particles which carry the polynucleotide sequences encoding them. In a particular embodiment, such phage can be utilized to display antigen binding domains expressed from a repertoire or combinatorial antibody library (e.g., human or murine). Phage expressing an antigen binding domain that binds the antigen of interest can be selected or identified with antigen, e.g., using labeled antigen or antigen bound or captured to a solid surface or bead. Phage used in these methods are typically filamentous phage including fd and M13 binding domains expressed from phage with Fab, Fv or disulfide stabilized Fv antibody domains recombinantly fused to either the phage gene III or gene VIII protein. Examples of phage display methods that can be used to make the antibodies of the present invention include those disclosed in Brinkman et al., J. Immunol. Methods 182:41-50 (1995); Ames et al., J. Immunol. Methods 184:177-186 (1995); Kettleborough et al., Eur. J. Immunol. 24:952-958 (1994); Persic et al., Gene 187 9-18 (1997); Burton et al., Advances in Immunology 57:191-280 (1994); PCT application No. PCT/GB91/01134; PCT publications WO 90/02809; WO 91/10737; WO 92/01047; WO 92/18619; WO 93/11236; WO 95/15982; WO 95/20401; and U.S. Pat. Nos. 5,698,426; 5,223,409; 5,403,484; 5,580,717; 5,427,908; 5,750,753; 5,821,047; 5,571,698; 5,427,908; 5,516,637; 5,780,225; 5,658,727; 5,733,743 and 5,969,108; each of which is incorporated herein by reference in its entirety.

[0236] As described in the above references, after phage selection, the antibody coding regions from the phage can be isolated and used to generate whole antibodies, including human antibodies, or any other desired antigen binding fragment, and expressed in any desired host, including mammalian cells, insect cells, plant cells, yeast, and bacteria, e.g., as described in detail below. For example, techniques to recombinantly produce Fab, Fab′ and F(ab′)2 fragments can also be employed using methods known in the art such as those disclosed in PCT publication WO 92/22324; Mullinax et al., BioTechniques 12(6):864-869 (1992); and Sawai et al., AJRI 34:26-34 (1995); and Better et al., Science 240:1041-1043 (1988) (said references incorporated by reference in their entireties).

[0237] Examples of techniques which can be used to produce single-chain Fvs and antibodies include those described in U.S. Pat. Nos. 4,946,778 and 5,258,498; Huston et al., Methods in Enzymology 203:46-88 (1991); Shu et al., PNAS 90:7995-7999 (1993); and Skerra et al., Science 240:1038-1040 (1988). For some uses, including in vivo use of antibodies in humans and in vitro detection assays, it may be preferable to use chimeric, humanized, or human antibodies. A chimeric antibody is a molecule in which different portions of the antibody are derived from different animal species, such as antibodies having a variable region derived from a murine monoclonal antibody and a human immunoglobulin constant region. Methods for producing chimeric antibodies are known in the art. See e.g., Morrison, Science 229:1202 (1985); Oi et al., BioTechniques 4:214 (1986); Gillies et al., (1989) J. Immunol. Methods 125:191-202; U.S. Pat. Nos. 5,807,715; 4,816,567; and 4,816397, which are incorporated herein by reference in their entirety. Humanized antibodies are antibody molecules from non-human species antibody that binds the desired antigen having one or more complementarity determining regions (CDRs) from the non-human species and a framework regions from a human immunoglobulin molecule. Often, framework residues in the human framework regions will be substituted with the corresponding residue from the CDR donor antibody to alter, preferably improve, antigen binding. These framework substitutions are identified by methods well known in the art, e.g., by modeling of the interactions of the CDR and framework residues to identify framework residues important for antigen binding and sequence comparison to identify unusual framework residues at particular positions. (See, e.g., Queen et al., U.S. Pat. No. 5,585,089; Riechmann et al., Nature 332:323 (1988), which are incorporated herein by reference in their entireties.) Antibodies can be humanized using a variety of techniques known in the art including, for example, CDR-grafting (EP 239,400; PCT publication WO 91/09967; U.S. Pat. Nos. 5,225,539; 5,530,101; and 5,585,089), veneering or resurfacing (EP 592,106; EP 519,596; Padlan, Molecular Immunology 28(4/5):489-498 (1991); Studnicka et al., Protein Engineering 7(6):805-814 (1994); Roguska. et al., PNAS 91:969-973 (1994)), and chain shuffling (U.S. Pat. No. 5,565,332).

[0238] Completely human antibodies are particularly desirable for therapeutic treatment of human patients. Human antibodies can be made by a variety of methods known in the art including phage display methods described above using antibody libraries derived from human immunoglobulin sequences. See also, U.S. Pat. Nos. 4,444,887 and 4,716,111; and PCT publications WO 98/46645, WO 98/50433, WO 98/24893, WO 98/16654, WO 96/34096, WO 96/33735, and WO 91/10741; each of which is incorporated herein by reference in its entirety.

[0239] Human antibodies can also be produced using transgenic mice which are incapable of expressing functional endogenous immunoglobulins, but which can express human immunoglobulin genes. For example, the human heavy and light chain immunoglobulin gene complexes may be introduced randomly or by homologous recombination into mouse embryonic stem cells. Alternatively, the human variable region, constant region, and diversity region may be introduced into mouse embryonic stem cells in addition to the human heavy and light chain genes. The mouse heavy and light chain immunoglobulin genes may be rendered non-functional separately or simultaneously with the introduction of human immunoglobulin loci by homologous recombination. In particular, homozygous deletion of the JH region prevents endogenous antibody production. The modified embryonic stem cells are expanded and microinjected into blastocysts to produce chimeric mice. The chimeric mice are then bred to produce homozygous offspring which express human antibodies. The transgenic mice are immunized in the normal fashion with a selected antigen, e.g., all or a portion of a polypeptide of the invention. Monoclonal antibodies directed against the antigen can be obtained from the immunized, transgenic mice using conventional hybridoma technology. The human immunoglobulin transgenes harbored by the transgenic mice rearrange during B cell differentiation, and subsequently undergo class switching and somatic mutation. Thus, using such a technique, it is possible to produce therapeutically useful IgG, IgA, IgM and IgE antibodies. For an overview of this technology for producing human antibodies, see Lonberg and Huszar, Int. Rev. Immunol. 13:65-93 (1995). For a detailed discussion of this technology for producing human antibodies and human monoclonal antibodies and protocols for producing such antibodies, see, e.g., PCT publications WO 98/24893; WO 92/01047; WO 96/34096; WO 96/33735; European Patent No. 0 598 877; U.S. Pat. Nos. 5,413,923; 5,625,126; 5,633,425; 5,569,825; 5,661,016; 5,545,806; 5,814,318; 5,885,793; 5,916,771; 5,939,598; 6,075,181; and 6,114,598, which are incorporated by reference herein in their entirety. In addition, companies such as Abgenix, Inc. (Freemont, Calif.) and Genpharm (San Jose, Calif.) can be engaged to provide human antibodies directed against a selected antigen using technology similar to that described above.

[0240] Completely human antibodies which recognize a selected epitope can be generated using a technique referred to as “guided selection.” In this approach a selected non-human monoclonal antibody, e.g., a mouse antibody, is used to guide the selection of a completely human antibody recognizing the same epitope. (Jespers et al., Bio/technology 12:899-903 (1988)).

[0241] Further, antibodies to the polypeptides of the invention can, in turn, be utilized to generate anti-idiotype antibodies that “mimic” polypeptides of the invention using techniques well known to those skilled in the art. (See, e.g., Greenspan & Bona, FASEB J. 7(5):437-444; (1989) and Nissinoff, J. Immunol. 147(8):2429-2438 (1991)). For example, antibodies which bind to and competitively inhibit polypeptide multimerization and/or binding of a polypeptide of the invention to a ligand can be used to generate anti-idiotypes that “mimic” the polypeptide multimerization and/or binding domain and, as a consequence, bind to and neutralize polypeptide and/or its ligand. Such neutralizing anti-idiotypes or Fab fragments of such anti-idiotypes can be used in therapeutic regimens to neutralize polypeptide ligand(s)/receptor(s). For example, such anti-idiotypic antibodies can be used to bind a polypeptide of the invention and/or to bind its ligand(s)/receptor(s), and thereby block its biological activity. Alternatively, antibodies which bind to and enhance polypeptide multimerization and/or binding, and/or receptor/ligand multimerization, binding and/or signaling can be used to generate anti-idiotypes that function as agonists of a polypeptide of the invention and/or its ligand/receptor. Such agonistic anti-idiotypes or Fab fragments of such anti-idiotypes can be used in therapeutic regimens as agonists of the polypeptides of the invention or its ligand(s)/receptor(s). For example, such anti-idiotypic antibodies can be used to bind a polypeptide of the invention and/or to bind its ligand(s)/receptor(s), and thereby promote or enhance its biological activity.

[0242] Intrabodies of the invention can be produced using methods known in the art, such as those disclosed and reviewed in Chen et al., Hum. Gene Ther. 5:595-601 (1994); Marasco, W. A., Gene Ther. 4:11-15 (1997); Rondon and Marasco, Annu. Rev. Microbiol. 51:257-283 (1997); Proba et al., J. Mol. Biol. 275:245-253 (1998); Cohen et al., Oncogene 17:2445-2456 (1998); Ohage and Steipe, J. Mol. Biol. 291:1119-1128 (1999); Ohage et al., J. Mol. Biol. 291:1129-1134 (1999); Wirtz and Steipe, Protein Sci. 8:2245-2250 (1999); Zhu et al., J. Immunol. Methods 231:207-222 (1999); and references cited therein.

[0243] Polynucleotides Encoding Antibodies

[0244] The invention further provides polynucleotides comprising a nucleotide sequence encoding an antibody of the invention and fragments thereof. The invention also encompasses polynucleotides that hybridize under stringent or alternatively, under lower stringency hybridization conditions, e.g., as defined supra, to polynucleotides that encode an antibody, preferably, that specifically binds to a polypeptide of the invention, preferably, an antibody that binds to a polypeptide having the amino acid sequence of SEQ ID NO:Y, to a polypeptide encoded by a portion of SEQ ID NO:X as defined in columns 8 and 9 of Table 2, and/or to a polypeptide encoded by the cDNA contained in Clone ID NO:Z.

[0245] The polynucleotides may be obtained, and the nucleotide sequence of the polynucleotides determined, by any method known in the art. For example, if the nucleotide sequence of the antibody is known, a polynucleotide encoding the antibody may be assembled from chemically synthesized oligonucleotides (e.g., as described in Kutmeier et al., BioTechniques 17:242 (1994)), which, briefly, involves the synthesis of overlapping oligonucleotides containing portions of the sequence encoding the antibody, annealing and ligating of those oligonucleotides, and then amplification of the ligated oligonucleotides by PCR.

[0246] Alternatively, a polynucleotide encoding an antibody may be generated from nucleic acid from a suitable source. If a clone containing a nucleic acid encoding a particular antibody is not available, but the sequence of the antibody molecule is known, a nucleic acid encoding the immunoglobulin may be chemically synthesized or obtained from a suitable source (e.g., an antibody cDNA library, or a cDNA library generated from, or nucleic acid, preferably poly A+ RNA, isolated from, any tissue or cells expressing the antibody, such as hybridoma cells selected to express an antibody of the invention) by PCR amplification using synthetic primers hybridizable to the 3′ and 5′ ends of the sequence or by cloning using an oligonucleotide probe specific for the particular gene sequence to identify, e.g., a cDNA clone from a cDNA library that encodes the antibody. Amplified nucleic acids generated by PCR may then be cloned into replicable cloning vectors using any method well known in the art.

[0247] Once the nucleotide sequence and corresponding amino acid sequence of the antibody is determined, the nucleotide sequence of the antibody may be manipulated using methods well known in the art for the manipulation of nucleotide sequences, e.g., recombinant DNA techniques, site directed mutagenesis, PCR, etc. (see, for example, the techniques described in Sambrook et al., 1990, Molecular Cloning, A Laboratory Manual, 2d Ed., Cold Spring Harbor Laboratory, Cold Spring Harbor, N.Y. and Ausubel et al., eds., 1998, Current Protocols in Molecular Biology, John Wiley & Sons, NY, which are both incorporated by reference herein in their entireties), to generate antibodies having a different amino acid sequence, for example to create amino acid substitutions, deletions, and/or insertions.

[0248] In a specific embodiment, the amino acid sequence of the heavy and/or light chain variable domains may be inspected to identify the sequences of the complementarity determining regions (CDRs) by methods that are well know in the art, e.g., by comparison to known amino acid sequences of other heavy and light chain variable regions to determine the regions of sequence hypervariability. Using routine recombinant DNA techniques, one or more of the CDRs may be inserted within framework regions, e.g., into human framework regions to humanize a non-human antibody, as described supra. The framework regions may be naturally occurring or consensus framework regions, and preferably human framework regions (see, e.g., Chothia et al., J. Mol. Biol. 278: 457-479 (1998) for a listing of human framework regions). Preferably, the polynucleotide generated by the combination of the framework regions and CDRs encodes an antibody that specifically binds a polypeptide of the invention. Preferably, as discussed supra, one or more amino acid substitutions may be made within the framework regions, and, preferably, the amino acid substitutions improve binding of the antibody to its antigen. Additionally, such methods may be used to make amino acid substitutions or deletions of one or more variable region cysteine residues participating in an intrachain disulfide bond to generate antibody molecules lacking one or more intrachain disulfide bonds. Other alterations to the polynucleotide are encompassed by the present invention and within the skill of the art.

[0249] In addition, techniques developed for the production of “chimeric antibodies” (Morrison et al., Proc. Natl. Acad. Sci. 81:851-855 (1984); Neuberger et al., Nature 312:604-608 (1984); Takeda et al., Nature 314:452-454 (1985)) by splicing genes from a mouse antibody molecule of appropriate antigen specificity together with genes from a human antibody molecule of appropriate biological activity can be used. As described supra, a chimeric antibody is a molecule in which different portions are derived from different animal species, such as those having a variable region derived from a murine mAb and a human immunoglobulin constant region, e.g., humanized antibodies.

[0250] Alternatively, techniques described for the production of single chain antibodies (U.S. Pat. No. 4,946,778; Bird, Science 242:423-42 (1988); Huston et al., Proc. Natl. Acad. Sci. USA 85:5879-5883 (1988); and Ward et al., Nature 334:544-54 (1989)) can be adapted to produce single chain antibodies. Single chain antibodies are formed by linking the heavy and light chain fragments of the Fv region via an amino acid bridge, resulting in a single chain polypeptide. Techniques for the assembly of functional Fv fragments in E. coli may also be used (Skerra et al., Science 242:1038-1041 (1988)).

[0251] Methods of Producing Antibodies

[0252] The antibodies of the invention can be produced by any method known in the art for the synthesis of antibodies, in particular, by chemical synthesis or preferably, by recombinant expression techniques. Methods of producing antibodies include, but are not limited to, hybridoma technology, EBV transformation, and other methods discussed herein as well as through the use recombinant DNA technology, as discussed below.

[0253] Recombinant expression of an antibody of the invention, or fragment, derivative or analog thereof, (e.g., a heavy or light chain of an antibody of the invention or a single chain antibody of the invention), requires construction of an expression vector containing a polynucleotide that encodes the antibody. Once a polynucleotide encoding an antibody molecule or a heavy or light chain of an antibody, or portion thereof (preferably containing the heavy or light chain variable domain), of the invention has been obtained, the vector for the production of the antibody molecule may be produced by recombinant DNA technology using techniques well known in the art. Thus, methods for preparing a protein by expressing a polynucleotide containing an antibody encoding nucleotide sequence are described herein. Methods which are well known to those skilled in the art can be used to construct expression vectors containing antibody coding sequences and appropriate transcriptional and translational control signals. These methods include, for example, in vitro recombinant DNA techniques, synthetic techniques, and in vivo genetic recombination. The invention, thus, provides replicable vectors comprising a nucleotide sequence encoding an antibody molecule of the invention, or a heavy or light chain thereof, or a heavy or light chain variable domain, operably linked to a promoter. Such vectors may include the nucleotide sequence encoding the constant region of the antibody molecule (see, e.g., PCT Publication WO 86/05807; PCT Publication WO 89/01036; and U.S. Pat. No. 5,122,464) and the variable domain of the antibody may be cloned into such a vector for expression of the entire heavy or light chain.

[0254] The expression vector is transferred to a host cell by conventional techniques and the transfected cells are then cultured by conventional techniques to produce an antibody of the invention. Thus, the invention includes host cells containing a polynucleotide encoding an antibody of the invention, or a heavy or light chain thereof, or a single chain antibody of the invention, operably linked to a heterologous promoter. In preferred embodiments for the expression of double-chained antibodies, vectors encoding both the heavy and light chains may be co-expressed in the host cell for expression of the entire immunoglobulin molecule, as detailed below.

[0255] A variety of host-expression vector systems may be utilized to express the antibody molecules of the invention. Such host-expression systems represent vehicles by which the coding sequences of interest may be produced and subsequently purified, but also represent cells which may, when transformed or transfected with the appropriate nucleotide coding sequences, express an antibody molecule of the invention in situ. These include but are not limited to microorganisms such as bacteria (e.g., E. coli, B. subtilis) transformed with recombinant bacteriophage DNA, plasmid DNA or cosmid DNA expression vectors containing antibody coding sequences; yeast (e.g., Saccharomyces, Pichia) transformed with recombinant yeast expression vectors containing antibody coding sequences; insect cell systems infected with recombinant virus expression vectors (e.g., baculovirus) containing antibody coding sequences; plant cell systems infected with recombinant virus expression vectors (e.g., cauliflower mosaic virus, CaMV; tobacco mosaic virus, TMV) or transformed with recombinant plasmid expression vectors (e.g., Ti plasmid) containing antibody coding sequences; or mammalian cell systems (e.g., COS, CHO, BHK, 293, 3T3 cells) harboring recombinant expression constructs containing promoters derived from the genome of mammalian cells (e.g., metallothionein promoter) or from mammalian viruses (e.g., the adenovirus late promoter; the vaccinia virus 7.5K promoter). Preferably, bacterial cells such as Escherichia coli, and more preferably, eukaryotic cells, especially for the expression of whole recombinant antibody molecule, are used for the expression of a recombinant antibody molecule. For example, mammalian cells such as Chinese hamster ovary cells (CHO), in conjunction with a vector such as the major intermediate early gene promoter element from human cytomegalovirus is an effective expression system for antibodies (Foecking et al., Gene 45:101 (1986); Cockett et al., Bio/Technology 8:2 (1990)).

[0256] In bacterial systems, a number of expression vectors may be advantageously selected depending upon the use intended for the antibody molecule being expressed. For example, when a large quantity of such a protein is to be produced, for the generation of pharmaceutical compositions of an antibody molecule, vectors which direct the expression of high levels of fusion protein products that are readily purified may be desirable. Such vectors include, but are not limited, to the E. coli expression vector pUR278 (Ruther et al., EMBO J. 2:1791 (1983)), in which the antibody coding sequence may be ligated individually into the vector in frame with the lac Z coding region so that a fusion protein is produced; pIN vectors (Inouye & Inouye, Nucleic Acids Res. 13:3101-3109 (1985); Van Heeke & Schuster, J. Biol. Chem. 24:5503-5509 (1989)); and the like. pGEX vectors may also be used to express foreign polypeptides as fusion proteins with glutathione S-transferase (GST). In general, such fusion proteins are soluble and can easily be purified from lysed cells by adsorption and binding to matrix glutathione-agarose beads followed by elution in the presence of free glutathione. The pGEX vectors are designed to include thrombin or factor Xa protease cleavage sites so that the cloned target gene product can be released from the GST moiety.

[0257] In an insect system, Autographa californica nuclear polyhedrosis virus (AcNPV) is used as a vector to express foreign genes. The virus grows in Spodoptera frugiperda cells. The antibody coding sequence may be cloned individually into non-essential regions (for example the polyhedrin gene) of the virus and placed under control of an AcNPV promoter (for example the polyhedrin promoter).

[0258] In mammalian host cells, a number of viral-based expression systems may be utilized. In cases where an adenovirus is used as an expression vector, the antibody coding sequence of interest may be ligated to an adenovirus transcription/translation control complex, e.g., the late promoter and tripartite leader sequence. This chimeric gene may then be inserted in the adenovirus genome by in vitro or in vivo recombination. Insertion in a non-essential region of the viral genome (e.g., region E1 or E3) will result in a recombinant virus that is viable and capable of expressing the antibody molecule in infected hosts. (e.g., see Logan & Shenk, Proc. Natl. Acad. Sci. USA 81:355-359 (1984)). Specific initiation signals may also be required for efficient translation of inserted antibody coding sequences. These signals include the ATG initiation codon and adjacent sequences. Furthermore, the initiation codon must be in phase with the reading frame of the desired coding sequence to ensure translation of the entire insert. These exogenous translational control signals and initiation codons can be of a variety of origins, both natural and synthetic. The efficiency of expression may be enhanced by the inclusion of appropriate transcription enhancer elements, transcription terminators, etc. (see Bittner et al., Methods in Enzymol. 153:51-544 (1987)).

[0259] In addition, a host cell strain may be chosen which modulates the expression of the inserted sequences, or modifies and processes the gene product in the specific fashion desired. Such modifications (e.g., glycosylation) and processing (e.g., cleavage) of protein products may be important for the function of the protein. Different host cells have characteristic and specific mechanisms for the post-translational processing and modification of proteins and gene products. Appropriate cell lines or host systems can be chosen to ensure the correct modification and processing of the foreign protein expressed. To this end, eukaryotic host cells which possess the cellular machinery for proper processing of the primary transcript, glycosylation, and phosphorylation of the gene product may be used. Such mammalian host cells include but are not limited to CHO, VERY, BHK, Hela, COS, MDCK, 293, 3T3, WI38, and in particular, breast cancer cell lines such as, for example, BT483, Hs578T, HTB2, BT20 and T47D, and normal mammary gland cell line such as, for example, CRL7030 and Hs578Bst.

[0260] For long-term, high-yield production of recombinant proteins, stable expression is preferred. For example, cell lines which stably express the antibody molecule may be engineered. Rather than using expression vectors which contain viral origins of replication, host cells can be transformed with DNA controlled by appropriate expression control elements (e.g., promoter, enhancer, sequences, transcription terminators, polyadenylation sites, etc.), and a selectable marker. Following the introduction of the foreign DNA, engineered cells may be allowed to grow for 1-2 days in an enriched media, and then are switched to a selective media. The selectable marker in the recombinant plasmid confers resistance to the selection and allows cells to stably integrate the plasmid into their chromosomes and grow to form foci which in turn can be cloned and expanded into cell lines. This method may advantageously be used to engineer cell lines which express the antibody molecule. Such engineered cell lines may be particularly useful in screening and evaluation of compounds that interact directly or indirectly with the antibody molecule.

[0261] A number of selection systems may be used, including but not limited to the herpes simplex virus thymidine kinase (Wigler et al., Cell 11:223 (1977)), hypoxanthine-guanine phosphoribosyltransferase (Szybalska & Szybalski, Proc. Natl. Acad. Sci. USA 48:202 (1992)), and adenine phosphoribosyltransferase (Lowy et al., Cell 22:817 (1980)) genes can be employed in tk-, hgprt- or aprt-cells, respectively. Also, antimetabolite resistance can be used as the basis of selection for the following genes: dhfr, which confers resistance to methotrexate (Wigler et al., Natl. Acad. Sci. USA 77:357 (1980); O'Hare et al., Proc. Natl. Acad. Sci. USA 78:1527 (1981)); gpt, which confers resistance to mycophenolic acid (Mulligan & Berg, Proc. Natl. Acad. Sci. USA 78:2072 (1981)); neo, which confers resistance to the aminoglycoside G-418 Clinical Pharmacy 12:488-505; Wu and Wu, Biotherapy 3:87-95 (1991); Tolstoshev, Ann. Rev. Pharmacol. Toxicol. 32:573-596 (1993); Mulligan, Science 260:926-932 (1993); and Morgan and Anderson, Ann. Rev. Biochem. 62:191-217 (1993); May, 1993, TIB TECH 11(5):155-215 (1993)); and hygro, which confers resistance to hygromycin (Santerre et al., Gene 30:147 (1984)). Methods commonly known in the art of recombinant DNA technology may be routinely applied to select the desired recombinant clone, and such methods are described, for example, in Ausubel et al. (eds.), Current Protocols in Molecular Biology, John Wiley & Sons, NY (1993); Kriegler, Gene Transfer and Expression, A Laboratory Manual, Stockton Press, NY (1990); and in Chapters 12 and 13, Dracopoli et al. (eds), Current Protocols in Human Genetics, John Wiley & Sons, NY (1994); Colberre-Garapin et al., J. Mol. Biol. 150:1 (1981), which are incorporated by reference herein in their entireties.

[0262] The expression levels of an antibody molecule can be increased by vector amplification (for a review, see Bebbington and Hentschel, The use of vectors based on gene amplification for the expression of cloned genes in mammalian cells in DNA cloning, Vol.3. (Academic Press, New York, 1987)). When a marker in the vector system expressing antibody is amplifiable, increase in the level of inhibitor present in culture of host cell will increase the number of copies of the marker gene. Since the amplified region is associated with the antibody gene, production of the antibody will also increase (Crouse et al., Mol. Cell. Biol. 3:257 (1983)).

[0263] Vectors which use glutamine synthase (GS) or DHFR as the selectable markers can be amplified in the presence of the drugs methionine sulphoximine or methotrexate, respectively. An advantage of glutamine synthase based vectors are the availabilty of cell lines (e.g., the murine myeloma cell line, NS0) which are glutamine synthase negative. Glutamine synthase expression systems can also function in glutamine synthase expressing cells (e.g. Chinese Hamster Ovary (CHO) cells) by providing additional inhibitor to prevent the functioning of the endogenous gene. A glutamine synthase expression system and components thereof are detailed in PCT publications: WO87/04462; WO86/05807; WO89101036; WO89/10404; and WO91/06657 which are incorporated in their entireties by reference herein. Additionally, glutamine synthase expression vectors that may be used according to the present invention are commercially available from suplliers, including, for example Lonza Biologics, Inc. (Portsmouth, N.H.). Expression and production of monoclonal antibodies using a GS expression system in murine myeloma cells is described in Bebbington et al., Bio/technology 10:169(1992) and in Biblia and Robinson Biotechnol. Prog. 11:1 (1995) which are incorporated in their entirities by reference herein.

[0264] The host cell may be co-transfected with two expression vectors of the invention, the first vector encoding a heavy chain derived polypeptide and the second vector encoding a light chain derived polypeptide. The two vectors may contain identical selectable markers which enable equal expression of heavy and light chain polypeptides. Alternatively, a single vector may be used which encodes, and is capable of expressing, both heavy and light chain polypeptides. In such situations, the light chain should be placed before the heavy chain to avoid an excess of toxic free heavy chain (Proudfoot, Nature 322:52 (1986); Kohler, Proc. Natl. Acad. Sci. USA 77:2197 (1980)). The coding sequences for the heavy and light chains may comprise cDNA or genomic DNA.

[0265] Once an antibody molecule of the invention has been produced by an animal, chemically synthesized, or recombinantly expressed, it may be purified by any method known in the art for purification of an immunoglobulin molecule, for example, by chromatography (e.g., ion exchange, affinity, particularly by affinity for the specific antigen after Protein A, and sizing column chromatography), centrifugation, differential solubility, or by any other standard technique for the purification of proteins. In addition, the antibodies of the present invention or fragments thereof can be fused to heterologous polypeptide sequences described herein or otherwise known in the art, to facilitate purification.

[0266] The present invention encompasses antibodies recombinantly fused or chemically conjugated (including both covalently and non-covalently conjugations) to a polypeptide (or portion thereof, preferably at least 10, 20, 30, 40, 50, 60, 70, 80, 90 or 100 amino acids of the polypeptide) of the present invention to generate fusion proteins. The fusion does not necessarily need to be direct, but may occur through linker sequences. The antibodies may be specific for antigens other than polypeptides (or portion thereof, preferably at least 10, 20, 30, 40, 50, 60, 70, 80, 90 or 100 amino acids of the polypeptide) of the present invention. For example, antibodies may be used to target the polypeptides of the present invention to particular cell types, either in vitro or in vivo, by fusing or conjugating the polypeptides of the present invention to antibodies specific for particular cell surface receptors. Antibodies fused or conjugated to the polypeptides of the present invention may also be used in in vitro immunoassays and purification methods using methods known in the art. See e.g., Harbor et al., supra, and PCT publication WO 93/21232; EP 439,095; Naramura et al., Immunol. Lett. 39:91-99 (1994); U.S. Pat. No. 5,474,981; Gillies et al., PNAS 89:1428-1432 (1992); Fell et al., J. Immunol. 146:2446-2452 (1991), which are incorporated by reference in their entireties.

[0267] The present invention further includes compositions comprising the polypeptides of the present invention fused or conjugated to antibody domains other than the variable regions. For example, the polypeptides of the present invention may be fused or conjugated to an antibody Fc region, or portion thereof. The antibody portion fused to a polypeptide of the present invention may comprise the constant region, hinge region, CH1 domain, CH2 domain, and CH3 domain or any combination of whole domains or portions thereof. The polypeptides may also be fused or conjugated to the above antibody portions to form multimers. For example, Fc portions fused to the polypeptides of the present invention can form dimers through disulfide bonding between the Fc portions. Higher multimeric forms can be made by fusing the polypeptides to portions of IgA and IgM. Methods for fusing or conjugating the polypeptides of the present invention to antibody portions are known in the art. See, e.g., U.S. Pat. Nos. 5,336,603; 5,622,929; 5,359,046; 5,349,053; 5,447,851; 5,112,946; EP 307,434; EP 367,166; PCT publications WO 96/04388; WO 91/06570; Ashkenazi et al., Proc. Natl. Acad. Sci. USA 88:10535-10539 (1991); Zheng et al., J. Immunol. 154:5590-5600 (1995); and Vil et al., Proc. Natl. Acad. Sci. USA 89:11337-11341 (1992) (said references incorporated by reference in their entireties).

[0268] As discussed, supra, the polypeptides corresponding to a polypeptide, polypeptide fragment, or a variant of SEQ ID NO:Y may be fused or conjugated to the above antibody portions to increase the in vivo half life of the polypeptides or for use in immunoassays using methods known in the art. Further, the polypeptides corresponding to SEQ ID NO:Y may be fused or conjugated to the above antibody portions to facilitate purification. One reported example describes chimeric proteins consisting of the first two domains of the human CD4-polypeptide and various domains of the constant regions of the heavy or light chains of mammalian immunoglobulins. See EP 394,827; and Traunecker et al., Nature 331:84-86 (1988). The polypeptides of the present invention fused or conjugated to an antibody having disulfide-linked dimeric structures (due to the IgG) may also be more efficient in binding and neutralizing other molecules, than the monomeric secreted protein or protein fragment alone. See, for example, Fountoulakis et al., J. Biochem. 270:3958-3964 (1995). In many cases, the Fc part in a fusion protein is beneficial in therapy and diagnosis, and thus can result in, for example, improved pharmacokinetic properties. See, for example, EP A 232,262. Alternatively, deleting the Fc part after the fusion protein has been expressed, detected, and purified, would be desired. For example, the Fc portion may hinder therapy and diagnosis if the fusion protein is used as an antigen for immunizations. In drug discovery, for example, human proteins, such as hIL-5, have been fused with Fc portions for the purpose of high-throughput screening assays to identify antagonists of hIL-5. (See, Bennett et al., J. Molecular Recognition 8:52-58 (1995); Johanson et al., J. Biol. Chem. 270:9459-9471 (1995)).

[0269] Moreover, the antibodies or fragments thereof of the present invention can be fused to marker sequences, such as a peptide to facilitate purification. In preferred embodiments, the marker amino acid sequence is a hexa-histidine peptide, such as the tag provided in a pQE vector (QIAGEN, Inc., 9259 Eton Avenue, Chatsworth, Calif., 91311), among others, many of which are commercially available. As described in Gentz et al., Proc. Natl. Acad. Sci. USA 86:821-824 (1989), for instance, hexa-histidine provides for convenient purification of the fusion protein. Other peptide tags useful for purification include, but are not limited to, the “HA” tag, which corresponds to an epitope derived from the influenza hemagglutinin protein (Wilson et al., Cell 37:767 (1984)) and the “flag” tag.

[0270] The present invention further encompasses antibodies or fragments thereof conjugated to a diagnostic or therapeutic agent. The antibodies can be used diagnostically to, for example, monitor the development or progression of a tumor as part of a clinical testing procedure to, e.g., determine the efficacy of a given treatment regimen. Detection can be facilitated by coupling the antibody to a detectable substance. Examples of detectable substances include various enzymes, prosthetic groups, fluorescent materials, luminescent materials, bioluminescent materials, radioactive materials, positron emitting metals using various positron emission tomographies, and nonradioactive paramagnetic metal ions. The detectable substance may be coupled or conjugated either directly to the antibody (or fragment thereof) or indirectly, through an intermediate (such as, for example, a linker known in the art) using techniques known in the art. See, for example, U.S. Pat. No. 4,741,900 for metal ions which can be conjugated to antibodies for use as diagnostics according to the present invention. Examples of suitable enzymes include horseradish peroxidase, alkaline phosphatase, beta-galactosidase, or acetylcholinesterase; examples of suitable prosthetic group complexes include streptavidin/biotin and avidin/biotin; examples of suitable fluorescent materials include umbelliferone, fluorescein, fluorescein isothiocyanate, rhodamine, dichlorotriazinylamine fluorescein, dansyl chloride or phycoerythrin; an example of a luminescent material includes luminol; examples of bioluminescent materials include luciferase, luciferin, and aequorin; and examples of suitable radioactive material include 125I, 131I, 111In or 99Tc.

[0271] Further, an antibody or fragment thereof may be conjugated to a therapeutic moiety such as a cytotoxin, e.g., a cytostatic or cytocidal agent, a therapeutic agent or a radioactive metal ion, e.g., alpha-emitters such as, for example, 213Bi. A cytotoxin or cytotoxic agent includes any agent that is detrimental to cells. Examples include paclitaxol, cytochalasin B, gramicidin D, ethidium bromide, emetine, mitomycin, etoposide, tenoposide, vincristine, vinblastine, colchicin, doxorubicin, daunorubicin, dihydroxy anthracin dione, mitoxantrone, mithramycin, actinomycin D, 1-dehydrotestosterone, glucocorticoids, procaine, tetracaine, lidocaine, propranolol, and puromycin and analogs or homologs thereof. Therapeutic agents include, but are not limited to, antimetabolites (e.g., methotrexate, 6-mercaptopurine, 6-thioguanine, cytarabine, 5-fluorouracil decarbazine), alkylating agents (e.g., mechlorethamine, thioepa chlorambucil, melphalan, carmustine (BSNU) and lomustine (CCNU), cyclothosphamide, busulfan, dibromomannitol, streptozotocin, mitomycin C, and cis-dichlorodiamine platinum (II) (DDP) cisplatin), anthracyclines (e.g., daunorubicin (formerly daunomycin) and doxorubicin), antibiotics (e.g., dactinomycin (formerly actinomycin), bleomycin, mithramycin, and anthramycin (AMC)), and anti-mitotic agents (e.g., vincristine and vinblastine).

[0272] The conjugates of the invention can be used for modifying a given biological response, the therapeutic agent or drug moiety is not to be construed as limited to classical chemical therapeutic agents. For example, the drug moiety may be a protein or polypeptide possessing a desired biological activity. Such proteins may include, for example, a toxin such as abrin, ricin A, pseudomonas exotoxin, or diphtheria toxin; a protein such as tumor necrosis factor, a-interferon, β-interferon, nerve growth factor, platelet derived growth factor, tissue plasminogen activator, an apoptotic agent, e.g., TNF-alpha, TNF-beta, AIM I (See, International Publication No. WO 97/33899), AIM II (See, International Publication No. WO 97/34911), Fas Ligand (Takahashi et al., Int. Immunol., 6:1567-1574 (1994)), VEGI (See, International Publication No. WO 99/23105), a thrombotic agent or an anti-angiogenic agent, e.g., angiostatin or endostatin; or, biological response modifiers such as, for example, lymphokines, interleukin-1 (“IL-1”), interleukin-2 (“IL-2”), interleukin-6 (“IL-6”), granulocyte macrophage colony stimulating factor (“GM-CSF”), granulocyte colony stimulating factor (“G-CSF”), or other growth factors.

[0273] Antibodies may also be attached to solid supports, which are particularly useful for immunoassays or purification of the target antigen. Such solid supports include, but are not limited to, glass, cellulose, polyacrylamide, nylon, polystyrene, polyvinyl chloride or polypropylene.

[0274] Techniques for conjugating such therapeutic moiety to antibodies are well known. See, for example, Arnon et al., “Monoclonal Antibodies For Immunotargeting Of Drugs In Cancer Therapy”, in Monoclonal Antibodies And Cancer Therapy, Reisfeld et al. (eds.), pp. 243-56 (Alan R. Liss, Inc. 1985); Hellstrom et al., “Antibodies For Drug Delivery”, in Controlled Drug Delivery (2nd Ed.), Robinson et al. (eds.), pp. 623-53 (Marcel Dekker, Inc. 1987); Thorpe, “Antibody Carriers Of Cytotoxic Agents In Cancer Therapy: A Review”, in Monoclonal Antibodies '84: Biological And Clinical Applications, Pinchera et al. (eds.), pp. 475-506 (1985); “Analysis, Results, And Future Prospective Of The Therapeutic Use Of Radiolabeled Antibody In Cancer Therapy”, in Monoclonal Antibodies For Cancer Detection And Therapy, Baldwin et al. (eds.), pp. 303-16 (Academic Press 1985), and Thorpe et al., “The Preparation And Cytotoxic Properties Of Antibody-Toxin Conjugates”, Immunol. Rev. 62:119-58 (1982).

[0275] Alternatively, an antibody can be conjugated to a second antibody to form an antibody heteroconjugate as described by Segal in U.S. Pat. No. 4,676,980, which is incorporated herein by reference in its entirety.

[0276] An antibody, with or without a therapeutic moiety conjugated to it, administered alone or in combination with cytotoxic factor(s) and/or cytokine(s) can be used as a therapeutic.

[0277] Immunophenotyping

[0278] The antibodies of the invention may be utilized for immunophenotyping of cell lines and biological samples. Translation products of the gene of the present invention may be useful as cell-specific markers, or more specifically as cellular markers that are differentially expressed at various stages of differentiation and/or maturation of particular cell types. Monoclonal antibodies directed against a specific epitope, or combination of epitopes, will allow for the screening of cellular populations expressing the marker. Various techniques can be utilized using monoclonal antibodies to screen for cellular populations expressing the marker(s), and include magnetic separation using antibody-coated magnetic beads, “panning” with antibody attached to a solid matrix (i.e., plate), and flow cytometry (See, e.g., U.S. Pat. No. 5,985,660; and Morrison et al., Cell, 96:737-49 (1999)).

[0279] These techniques allow for the screening of particular populations of cells, such as might be found with hematological malignancies (i.e. minimal residual disease (MRD) in acute leukemic patients) and “non-self” cells in transplantations to prevent Graft-versus-Host Disease (GVHD). Alternatively, these techniques allow for the screening of hematopoietic stem and progenitor cells capable of undergoing proliferation and/or differentiation, as might be found in human umbilical cord blood.

[0280] Assays For Antibody Binding

[0281] The antibodies of the invention may be assayed for immunospecific binding by any method known in the art. The immunoassays which can be used include but are not limited to competitive and non-competitive assay systems using techniques such as western blots, radioimmunoassays, ELISA (enzyme linked immunosorbent assay), “sandwich” immunoassays, immunoprecipitation assays, precipitin reactions, gel diffusion precipitin reactions, immunodiffusion assays, agglutination assays, complement-fixation assays, immunoradiometric assays, fluorescent immunoassays, and protein A immunoassays, to name but a few. Such assays are routine and well known in the art (see, e.g., Ausubel et al, eds, 1994, Current Protocols in Molecular Biology, Vol. 1, John Wiley & Sons, Inc., New York, which is incorporated by reference herein in its entirety). Exemplary immunoassays are described briefly below (but are not intended by way of limitation).

[0282] Immunoprecipitation protocols generally comprise lysing a population of cells in a lysis buffer such as RIPA buffer (1% NP-40 or Triton X-100, 1% sodium deoxycholate, 0.1% SDS, 0.15 M NaCl, 0.01 M sodium phosphate at pH 7.2, 1% Trasylol) supplemented with protein phosphatase and/or protease inhibitors (e.g., EDTA, PMSF, aprotinin, sodium vanadate), adding the antibody of interest to the cell lysate, incubating for a period of time (e.g., 1-4 hours) at 4° C., adding protein A and/or protein G sepharose beads to the cell lysate, incubating for about an hour or more at 4° C., washing the beads in lysis buffer and resuspending the beads in SDS/sample buffer. The ability of the antibody of interest to immunoprecipitate a particular antigen can be assessed by, e.g., western blot analysis. One of skill in the art would be knowledgeable as to the parameters that can be modified to increase the binding of the antibody to an antigen and decrease the background (e.g., pre-clearing the cell lysate with sepharose beads). For further discussion regarding immunoprecipitation protocols see, e.g., Ausubel et al., eds., (1994), Current Protocols in Molecular Biology, Vol. 1, John Wiley & Sons, Inc., New York, section 10. 16.1.

[0283] Western blot analysis generally comprises preparing protein samples, electrophoresis of the protein samples in a polyacrylamide gel (e.g., 8%-20% SDS-PAGE depending on the molecular weight of the antigen), transferring the protein sample from the polyacrylamide gel to a membrane such as nitrocellulose, PVDF or nylon, blocking the membrane in blocking solution (e.g., PBS with 3% BSA or non-fat milk), washing the membrane in washing buffer (e.g., PBS-Tween 20), blocking the membrane with primary antibody (the antibody of interest) diluted in blocking buffer, washing the membrane in washing buffer, blocking the membrane with a secondary antibody (which recognizes the primary antibody, e.g., an anti-human antibody) conjugated to an enzymatic substrate (e.g., horseradish peroxidase or alkaline phosphatase) or radioactive molecule (e.g., 32P or 125I) diluted in blocking buffer, washing the membrane in wash buffer, and detecting the presence of the antigen. One of skill in the art would be knowledgeable as to the parameters that can be modified to increase the signal detected and to reduce the background noise. For further discussion regarding western blot protocols see, e.g., Ausubel et al, eds, (1994), Current Protocols in Molecular Biology, Vol. 1, John Wiley & Sons, Inc., New York, section 10.8.1.

[0284] ELISAs comprise preparing antigen, coating the well of a 96 well microtiter plate with the antigen, adding the antibody of interest conjugated to a detectable compound such as an enzymatic substrate (e.g., horseradish peroxidase or alkaline phosphatase) to the well and incubating for a period of time, and detecting the presence of the antigen. In ELISAs the antibody of interest does not have to be conjugated to a detectable compound; instead, a second antibody (which recognizes the antibody of interest) conjugated to a detectable compound may be added to the well. Further, instead of coating the well with the antigen, the antibody may be coated to the well. In this case, a second antibody conjugated to a detectable compound may be added following the addition of the antigen of interest to the coated well. One of skill in the art would be knowledgeable as to the parameters that can be modified to increase the signal detected as well as other variations of ELISAs known in the art. For further discussion regarding ELISAs see, e.g., Ausubel et al, eds, (1994), Current Protocols in Molecular Biology, Vol. 1, John Wiley & Sons, Inc., New York, section 11.2.1.

[0285] The binding affinity of an antibody to an antigen and the off-rate of an antibody-antigen interaction can be determined by competitive binding assays. One example of a competitive binding assay is a radioimmunoassay comprising the incubation of labeled antigen (e.g., 3H or 125I) with the antibody of interest in the presence of increasing amounts of unlabeled antigen, and the detection of the antibody bound to the labeled antigen. The affinity of the antibody of interest for a particular antigen and the binding off-rates can be determined from the data by scatchard plot analysis. Competition with a second antibody can also be determined using radioimmunoassays. In this case, the antigen is incubated with antibody of interest conjugated to a labeled compound (e.g., 3H or 125I) in the presence of increasing amounts of an unlabeled second antibody.

[0286] Antibodies of the invention may be characterized using immunocytochemisty methods on cells (e.g., mammalian cells, such as CHO cells) transfected with a vector enabling the expression of an antigen or with vector alone using techniques commonly known in the art. Antibodies that bind antigen transfected cells, but not vector-only transfected cells, are antigen specific.

[0287] Therapeutic Uses

[0288] The present invention is further directed to antibody-based therapies which involve administering antibodies of the invention to an animal, preferably a mammal, and most preferably a human, patient for treating one or more of the disclosed diseases, disorders, or conditions. Therapeutic compounds of the invention include, but are not limited to, antibodies of the invention (including fragments, analogs and derivatives thereof as described herein) and nucleic acids encoding antibodies of the invention (including fragments, analogs and derivatives thereof and anti-idiotypic antibodies as described herein). The antibodies of the invention can be used to treat, inhibit or prevent diseases, disorders or conditions associated with aberrant expression and/or activity of a polypeptide of the invention, including, but not limited to, any one or more of the diseases, disorders, or conditions described herein. The treatment and/or prevention of diseases, disorders, or conditions associated with aberrant expression and/or activity of a polypeptide of the invention includes, but is not limited to, alleviating symptoms associated with those diseases, disorders or conditions. Antibodies of the invention may be provided in pharmaceutically acceptable compositions as known in the art or as described herein.

[0289] In a specific and preferred embodiment, the present invention is directed to antibody-based therapies which involve administering antibodies of the invention to an animal, preferably a mammal, and most preferably a human, patient for treating one or more diseases, disorders, or conditions, including but not limited to: neural disorders, immune system disorders, muscular disorders, reproductive disorders, gastrointestinal disorders, pulmonary disorders, cardiovascular disorders, renal disorders, proliferative disorders, and/or cancerous diseases and conditions., and/or as described elsewhere herein. Therapeutic compounds of the invention include, but are not limited to, antibodies of the invention (e.g., antibodies directed to the full length protein expressed on the cell surface of a mammalian cell; antibodies directed to an epitope of a polypeptide of the invention (such as, for example, a predicted linear epitope shown in column 7 of Table 1A; or a conformational epitope, including fragments, analogs and derivatives thereof as described herein) and nucleic acids encoding antibodies of the invention (including fragments, analogs and derivatives thereof and anti-idiotypic antibodies as described herein). The antibodies of the invention can be used to treat, inhibit or prevent diseases, disorders or conditions associated with aberrant expression and/or activity of a polypeptide of the invention, including, but not limited to, any one or more of the diseases, disorders, or conditions described herein. The treatment and/or prevention of diseases, disorders, or conditions associated with aberrant expression and/or activity of a polypeptide of the invention includes, but is not limited to, alleviating symptoms associated with those diseases, disorders or conditions. Antibodies of the invention may be provided in pharmaceutically acceptable compositions as known in the art or as described herein.

[0290] A summary of the ways in which the antibodies of the present invention may be used therapeutically includes binding polynucleotides or polypeptides of the present invention locally or systemically in the body or by direct cytotoxicity of the antibody, e.g. as mediated by complement (CDC) or by effector cells (ADCC). Some of these approaches are described in more detail below. Armed with the teachings provided herein, one of ordinary skill in the art will know how to use the antibodies of the present invention for diagnostic, monitoring or therapeutic purposes without undue experimentation.

[0291] The antibodies of this invention may be advantageously utilized in combination with other monoclonal or chimeric antibodies, or with lymphokines or hematopoietic growth factors (such as, e.g., IL-2, IL-3 and IL-7), for example, which serve to increase the number or activity of effector cells which interact with the antibodies.

[0292] The antibodies of the invention may be administered alone or in combination with other types of treatments (e.g., radiation therapy, chemotherapy, hormonal therapy, immunotherapy and anti-tumor agents). Generally, administration of products of a species origin or species reactivity (in the case of antibodies) that is the same species as that of the patient is preferred. Thus, in a preferred embodiment, human antibodies, fragments derivatives, analogs, or nucleic acids, are administered to a human patient for therapy or prophylaxis.

[0293] It is preferred to use high affinity and/or potent in vivo inhibiting and/or neutralizing antibodies against polypeptides or polynucleotides of the present invention, fragments or regions thereof, for both immunoassays directed to and therapy of disorders related to polynucleotides or polypeptides, including fragments thereof, of the present invention. Such antibodies, fragments, or regions, will preferably have an affinity for polynucleotides or polypeptides of the invention, including fragments thereof. Preferred binding affinities include those with a dissociation constant or Kd less than 5×10⁻² M, 10⁻² M, 5×10⁻³ M, 10⁻³ M, 5×10⁻⁴ M, 10⁻⁴ M, 5×10⁻⁵ M, 10⁻⁵ M, 5×10⁻⁶ M, 10⁻⁶ M, 5×10⁻⁷ M, 10⁻⁷ M, 5×10⁻⁸ M, 10⁻⁸ M, 5×10⁻⁹ M, 10⁻⁹ M, 5×10⁻¹⁰ M, 10⁻¹⁰ M, 5×10⁻¹¹ M, 10⁻¹¹ M, 5×10⁻¹² M, 10⁻¹² M, 5×10⁻¹³ M, 10⁻¹³ M, 5×10⁻¹⁴ M, 10⁻¹⁴ M, 5×10⁻¹⁵M, and 10⁻¹⁵ M.

[0294] Gene Therapy

[0295] In a specific embodiment, nucleic acids comprising sequences encoding antibodies or functional derivatives thereof, are administered to treat, inhibit or prevent a disease or disorder associated with aberrant expression and/or activity of a polypeptide of the invention, by way of gene therapy. Gene therapy refers to therapy performed by the administration to a subject of an expressed or expressible nucleic acid. In this embodiment of the invention, the nucleic acids produce their encoded protein that mediates a therapeutic effect.

[0296] Any of the methods for gene therapy available in the art can be used according to the present invention. Exemplary methods are described below.

[0297] For general reviews of the methods of gene therapy, see Goldspiel et al., Clinical Pharmacy 12:488-505 (1993); Wu and Wu, Biotherapy 3:87-95 (1991); Tolstoshev, Ann. Rev. Pharmacol. Toxicol. 32:573-596 (1993); Mulligan, Science 260:926-932 (1993); and Morgan and Anderson, Ann. Rev. Biochem. 62:191-217 (1993); May, TIBTECH 11(5):155-215 (1993). Methods commonly known in the art of recombinant DNA technology which can be used are described in Ausubel et al. (eds.), Current Protocols in Molecular Biology, John Wiley & Sons, NY (1993); and Kriegler, Gene Transfer and Expression, A Laboratory Manual, Stockton Press, NY (1990).

[0298] In a preferred embodiment, the compound comprises nucleic acid sequences encoding an antibody, said nucleic acid sequences being part of expression vectors that express the antibody or fragments or chimeric proteins or heavy or light chains thereof in a suitable host. In particular, such nucleic acid sequences have promoters operably linked to the antibody coding region, said promoter being inducible or constitutive, and, optionally, tissue-specific. In another particular embodiment, nucleic acid molecules are used in which the antibody coding sequences and any other desired sequences are flanked by regions that promote homologous recombination at a desired site in the genome, thus providing for intrachromosomal expression of the antibody encoding nucleic acids (Koller and Smithies, Proc. Natl. Acad. Sci. USA 86:8932-8935 (1989); Zijlstra et al., Nature 342:435-438 (1989). In specific embodiments, the expressed antibody molecule is a single chain antibody; alternatively, the nucleic acid sequences include sequences encoding both the heavy and light chains, or fragments thereof, of the antibody.

[0299] Delivery of the nucleic acids into a patient may be either direct, in which case the patient is directly exposed to the nucleic acid or nucleic acid-carrying vectors, or indirect, in which case, cells are first transformed with the nucleic acids in vitro, then transplanted into the patient. These two approaches are known, respectively, as in vivo or ex vivo gene therapy.

[0300] In a specific embodiment, the nucleic acid sequences are directly administered in vivo, where it is expressed to produce the encoded product. This can be accomplished by any of numerous methods known in the art, e.g., by constructing them as part of an appropriate nucleic acid expression vector and administering it so that they become intracellular, e.g., by infection using defective or attenuated retrovirals or other viral vectors (see U.S. Pat. No. 4,980,286), or by direct injection of naked DNA, or by use of microparticle bombardment (e.g., a gene gun; Biolistic, Dupont), or coating with lipids or cell-surface receptors or transfecting agents, encapsulation in liposomes, microparticles, or microcapsules, or by administering them in linkage to a peptide which is known to enter the nucleus, by administering it in linkage to a ligand subject to receptor-mediated endocytosis (see, e.g., Wu and Wu, J. Biol. Chem. 262:4429-4432 (1987)) (which can be used to target cell types specifically expressing the receptors), etc. In another embodiment, nucleic acid-ligand complexes can be formed in which the ligand comprises a fusogenic viral peptide to disrupt endosomes, allowing the nucleic acid to avoid lysosomal degradation. In yet another embodiment, the nucleic acid can be targeted in vivo for cell specific uptake and expression, by targeting a specific receptor (see, e.g., PCT Publications WO 92/06180; WO 92/22635; WO92/20316; WO93/14188, WO 93/20221). Alternatively, the nucleic acid can be introduced intracellularly and incorporated within host cell DNA for expression, by homologous recombination (Koller and Smithies, Proc. Natl. Acad. Sci. USA 86:8932-8935 (1989); Zijlstra et al., Nature 342:435-438 (1989)).

[0301] In a specific embodiment, viral vectors that contains nucleic acid sequences encoding an antibody of the invention are used. For example, a retroviral vector can be used (see Miller et al., Meth. Enzymol. 217:581-599 (1993)). These retroviral vectors contain the components necessary for the correct packaging of the viral genome and integration into the host cell DNA. The nucleic acid sequences encoding the antibody to be used in gene therapy are cloned into one or more vectors, which facilitates delivery of the gene into a patient. More detail about retroviral vectors can be found in Boesen et al., Biotherapy 6:291-302 (1994), which describes the use of a retroviral vector to deliver the mdr1 gene to hematopoietic stem cells in order to make the stem cells more resistant to chemotherapy. Other references illustrating the use of retroviral vectors in gene therapy are: Clowes et al., J. Clin. Invest. 93:644-651 (1994); Kiem et al., Blood 83:1467-1473 (1994); Salmons and Gunzberg, Human Gene Therapy 4:129-141 (1993); and Grossman and Wilson, Curr. Opin. in Genetics and Devel. 3:110-114 (1993).

[0302] Adenoviruses are other viral vectors that can be used in gene therapy. Adenoviruses are especially attractive vehicles for delivering genes to respiratory epithelia. Adenoviruses naturally infect respiratory epithelia where they cause a mild disease. Other targets for adenovirus-based delivery systems are liver, the central nervous system, endothelial cells, and muscle. Adenoviruses have the advantage of being capable of infecting non-dividing cells. Kozarsky and Wilson, Current Opinion in Genetics and Development 3:499-503 (1993) present a review of adenovirus-based gene therapy. Bout et al., Human Gene Therapy 5:3-10 (1994) demonstrated the use of adenovirus vectors to transfer genes to the respiratory epithelia of rhesus monkeys. Other instances of the use of adenoviruses in gene therapy can be found in Rosenfeld et al., Science 252:431-434 (1991); Rosenfeld et al., Cell 68:143-155 (1992); Mastrangeli et al., J. Clin. Invest. 91:225-234 (1993); PCT Publication WO94/12649; and Wang, et al., Gene Therapy 2:775-783 (1995). In a preferred embodiment, adenovirus vectors are used.

[0303] Adeno-associated virus (AAV) has also been proposed for use in gene therapy (Walsh et al., Proc. Soc. Exp. Biol. Med. 204:289-300 (1993); U.S. Pat. No. 5,436,146).

[0304] Another approach to gene therapy involves transferring a gene to cells in tissue culture by such methods as electroporation, lipofection, calcium phosphate mediated transfection, or viral infection. Usually, the method of transfer includes the transfer of a selectable marker to the cells. The cells are then placed under selection to isolate those cells that have taken up and are expressing the transferred gene. Those cells are then delivered to a patient.

[0305] In this embodiment, the nucleic acid is introduced into a cell prior to administration in vivo of the resulting recombinant cell. Such introduction can be carried out by any method known in the art, including but not limited to transfection, electroporation, microinjection, infection with a viral or bacteriophage vector containing the nucleic acid sequences, cell fusion, chromosome-mediated gene transfer, microcell-mediated gene transfer, spheroplast fusion, etc. Numerous techniques are known in the art for the introduction of foreign genes into cells (see, e.g., Loeffler and Behr, Meth. Enzymol. 217:599-618 (1993); Cohen et al., Meth. Enzymol. 217:618-644 (1993); Cline, Pharmac. Ther. 29:69-92m (1985) and may be used in accordance with the present invention, provided that the necessary developmental and physiological functions of the recipient cells are not disrupted. The technique should provide for the stable transfer of the nucleic acid to the cell, so that the nucleic acid is expressible by the cell and preferably heritable and expressible by its cell progeny.

[0306] The resulting recombinant cells can be delivered to a patient by various methods known in the art. Recombinant blood cells (e.g., hematopoietic stem or progenitor cells) are preferably administered intravenously. The amount of cells envisioned for use depends on the desired effect, patient state, etc., and can be determined by one skilled in the art.

[0307] Cells into which a nucleic acid can be introduced for purposes of gene therapy encompass any desired, available cell type, and include but are not limited to epithelial cells, endothelial cells, keratinocytes, fibroblasts, muscle cells, hepatocytes; blood cells such as T lymphocytes, B lymphocytes, monocytes, macrophages, neutrophils, eosinophils, megakaryocytes, granulocytes; various stem or progenitor cells, in particular hematopoietic stem or progenitor cells, e.g., as obtained from bone marrow, umbilical cord blood, peripheral blood, fetal liver, etc. 1290 In a preferred embodiment, the cell used for gene therapy is autologous to the patient.

[0308] In an embodiment in which recombinant cells are used in gene therapy, nucleic acid sequences encoding an antibody are introduced into the cells such that they are expressible by the cells or their progeny, and the recombinant cells are then administered in vivo for therapeutic effect. In a specific embodiment, stem or progenitor cells are used. Any stem and/or progenitor cells which can be isolated and maintained in vitro can potentially be used in accordance with this embodiment of the present invention (see e.g. PCT Publication WO 94/08598; Stemple and Anderson, Cell 71:973-985 (1992); Rheinwald, Meth. Cell Bio. 21A:229 (1980); and Pittelkow and Scott, Mayo Clinic Proc. 61:771 (1986)).

[0309] In a specific embodiment, the nucleic acid to be introduced for purposes of gene therapy comprises an inducible promoter operably linked to the coding region, such that expression of the nucleic acid is controllable by the presence or absence of an appropriate inducer of transcription.

[0310] Demonstration of Therapeutic or Prophylactic Activity

[0311] The compounds or pharmaceutical compositions of the invention are preferably tested in vitro, and then in vivo for the desired therapeutic or prophylactic activity, prior to use in humans. For example, in vitro assays to demonstrate the therapeutic or prophylactic utility of a compound or pharmaceutical composition include, the effect of a compound on a cell line or a patient tissue sample. The effect of the compound or composition on the cell line and/or tissue sample can be determined utilizing techniques known to those of skill in the art including, but not limited to, rosette formation assays and cell lysis assays. In accordance with the invention, in vitro assays which can be used to determine whether administration of a specific compound is indicated, include in vitro cell culture assays in which a patient tissue sample is grown in culture, and exposed to or otherwise administered a compound, and the effect of such compound upon the tissue sample is observed.

[0312] Therapeutic/Prophylactic Administration and Composition

[0313] The invention provides methods of treatment, inhibition and prophylaxis by administration to a subject of an effective amount of a compound or pharmaceutical composition of the invention, preferably a polypeptide or antibody of the invention. In a preferred embodiment, the compound is substantially purified (e.g., substantially free from substances that limit its effect or produce undesired side-effects). The subject is preferably an animal, including but not limited to animals such as cows, pigs, horses, chickens, cats, dogs, etc., and is preferably a mammal, and most preferably human.

[0314] Formulations and methods of administration that can be employed when the compound comprises a nucleic acid or an immunoglobulin are described above; additional appropriate formulations and routes of administration can be selected from among those described herein below.

[0315] Various delivery systems are known and can be used to administer a compound of the invention, e.g., encapsulation in liposomes, microparticles, microcapsules, recombinant cells capable of expressing the compound, receptor-mediated endocytosis (see, e.g., Wu and Wu, J. Biol. Chem. 262:4429-4432 (1987)), construction of a nucleic acid as part of a retroviral or other vector, etc. Methods of introduction include but are not limited to intradermal, intramuscular, intraperitoneal, intravenous, subcutaneous, intranasal, epidural, and oral routes. The compounds or compositions may be administered by any convenient route, for example by infusion or bolus injection, by absorption through epithelial or mucocutaneous linings (e.g., oral mucosa, rectal and intestinal mucosa, etc.) and may be administered together with other biologically active agents. Administration can be systemic or local. In addition, it may be desirable to introduce the pharmaceutical compounds or compositions of the invention into the central nervous system by any suitable route, including intraventricular and intrathecal injection; intraventricular injection may be facilitated by an intraventricular catheter, for example, attached to a reservoir, such as an Ommaya reservoir. Pulmonary administration can also be employed, e.g., by use of an inhaler or nebulizer, and formulation with an aerosolizing agent.

[0316] In a specific embodiment, it may be desirable to administer the pharmaceutical compounds or compositions of the invention locally to the area in need of treatment; this may be achieved by, for example, and not by way of limitation, local infusion during surgery, topical application, e.g., in conjunction with a wound dressing after surgery, by injection, by means of a catheter, by means of a suppository, or by means of an implant, said implant being of a porous, non-porous, or gelatinous material, including membranes, such as sialastic membranes, or fibers. Preferably, when administering a protein, including an antibody, of the invention, care must be taken to use materials to which the protein does not absorb.

[0317] In another embodiment, the compound or composition can be delivered in a vesicle, in particular a liposome (see Langer, Science 249:1527-1533 (1990); Treat et al., in Liposomes in the Therapy of Infectious Disease and Cancer, Lopez-Berestein and Fidler (eds.), Liss, New York, pp. 353-365 (1989); Lopez-Berestein, ibid., pp. 317-327; see generally ibid.)

[0318] In yet another embodiment, the compound or composition can be delivered in a controlled release system. In one embodiment, a pump may be used (see Langer, supra; Sefton, CRC Crit. Ref. Biomed. Eng. 14:201 (1987); Buchwald et al., Surgery 88:507 (1980); Saudek et al., N. Engl. J. Med. 321:574 (1989)). In another embodiment, polymeric materials can be used (see Medical Applications of Controlled Release, Langer and Wise (eds.), CRC Pres., Boca Raton, Fla. (1974); Controlled Drug Bioavailability, Drug Product Design and Performance, Smolen and Ball (eds.), Wiley, New York (1984); Ranger and Peppas, J., Macromol. Sci. Rev. Macromol. Chem. 23:61 (1983); see also Levy et al., Science 228:190 (1985); During et al., Ann. Neurol. 25:351 (1989); Howard et al., J. Neurosurg. 71:105 (1989)). In yet another embodiment, a controlled release system can be placed in proximity of the therapeutic target, e.g., the brain, thus requiring only a fraction of the systemic dose (see, e.g., Goodson, in Medical Applications of Controlled Release, supra, vol. 2, pp. 115-138 (1984)).

[0319] Other controlled release systems are discussed in the review by Langer (Science 249:1527-1533 (1990)).

[0320] In a specific embodiment where the compound of the invention is a nucleic acid encoding a protein, the nucleic acid can be administered in vivo to promote expression of its encoded protein, by constructing it as part of an appropriate nucleic acid expression vector and administering it so that it becomes intracellular, e.g., by use of a retroviral vector (see U.S. Pat. No. 4,980,286), or by direct injection, or by use of microparticle bombardment (e.g., a gene gun; Biolistic, Dupont), or coating with lipids or cell-surface receptors or transfecting agents, or by administering it in linkage to a homeobox-like peptide which is known to enter the nucleus (see e.g., Joliot et al., Proc. Natl. Acad. Sci. USA 88:1864-1868 (1991)), etc. Alternatively, a nucleic acid can be introduced intracellularly and incorporated within host cell DNA for expression, by homologous recombination.

[0321] The present invention also provides pharmaceutical compositions. Such compositions comprise a therapeutically effective amount of a compound, and a pharmaceutically acceptable carrier. In a specific embodiment, the term “pharmaceutically acceptable” means approved by a regulatory agency of the Federal or a state government or listed in the U.S. Pharmacopeia or other generally recognized pharmacopeia for use in animals, and more particularly in humans. The term “carrier” refers to a diluent, adjuvant, excipient, or vehicle with which the therapeutic is administered. Such pharmaceutical carriers can be sterile liquids, such as water and oils, including those of petroleum, animal, vegetable or synthetic origin, such as peanut oil, soybean oil, mineral oil, sesame oil and the like. Water is a preferred carrier when the pharmaceutical composition is administered intravenously. Saline solutions and aqueous dextrose and glycerol solutions can also be employed as liquid carriers, particularly for injectable solutions. Suitable pharmaceutical excipients include starch, glucose, lactose, sucrose, gelatin, malt, rice, flour, chalk, silica gel, sodium stearate, glycerol monostearate, talc, sodium chloride, dried skim milk, glycerol, propylene, glycol, water, ethanol and the like. The composition, if desired, can also contain minor amounts of wetting or emulsifying agents, or pH buffering agents. These compositions can take the form of solutions, suspensions, emulsion, tablets, pills, capsules, powders, sustained-release formulations and the like. The composition can be formulated as a suppository, with traditional binders and carriers such as triglycerides. Oral formulation can include standard carriers such as pharmaceutical grades of mannitol, lactose, starch, magnesium stearate, sodium saccharine, cellulose, magnesium carbonate, etc. Examples of suitable pharmaceutical carriers are described in “Remington's Pharmaceutical Sciences” by E. W. Martin. Such compositions will contain a therapeutically effective amount of the compound, preferably in purified form, together with a suitable amount of carrier so as to provide the form for proper administration to the patient. The formulation should suit the mode of administration.

[0322] In a preferred embodiment, the composition is formulated in accordance with routine procedures as a pharmaceutical composition adapted for intravenous administration to human beings. Typically, compositions for intravenous administration are solutions in sterile isotonic aqueous buffer. Where necessary, the composition may also include a solubilizing agent and a local anesthetic such as lignocaine to ease pain at the site of the injection. Generally, the ingredients are supplied either separately or mixed together in unit dosage form, for example, as a dry lyophilized powder or water free concentrate in a hermetically sealed container such as an ampoule or sachette indicating the quantity of active agent. Where the composition is to be administered by infusion, it can be dispensed with an infusion bottle containing sterile pharmaceutical grade water or saline. Where the composition is administered by injection, an ampoule of sterile water for injection or saline can be provided so that the ingredients may be mixed prior to administration.

[0323] The compounds of the invention can be formulated as neutral or salt forms. Pharmaceutically acceptable salts include those formed with anions such as those derived from hydrochloric, phosphoric, acetic, oxalic, tartaric acids, etc., and those formed with cations such as those derived from sodium, potassium, ammonium, calcium, ferric hydroxides, isopropylamine, triethylamine, 2-ethylamino ethanol, histidine, procaine, etc.

[0324] The amount of the compound of the invention which will be effective in the treatment, inhibition and prevention of a disease or disorder associated with aberrant expression and/or activity of a polypeptide of the invention can be determined by standard clinical techniques. In addition, in vitro assays may optionally be employed to help identify optimal dosage ranges. The precise dose to be employed in the formulation will also depend on the route of administration, and the seriousness of the disease or disorder, and should be decided according to the judgment of the practitioner and each patient's circumstances. Effective doses may be extrapolated from dose-response curves derived from in vitro or animal model test systems.

[0325] For antibodies, the dosage administered to a patient is typically 0.1 mg/kg to 100 mg/kg of the patient's body weight. Preferably, the dosage administered to a patient is between 0.1 mg/kg and 20 mg/kg of the patient's body weight, more preferably 1 mg/kg to 10 mg/kg of the patient's body weight. Generally, human antibodies have a longer half-life within the human body than antibodies from other species due to the immune response to the foreign polypeptides. Thus, lower dosages of human antibodies and less frequent administration is often possible. Further, the dosage and frequency of administration of antibodies of the invention may be reduced by enhancing uptake and tissue penetration (e.g., into the brain) of the antibodies by modifications such as, for example, lipidation.

[0326] The invention also provides a pharmaceutical pack or kit comprising one or more containers filled with one or more of the ingredients of the pharmaceutical compositions of the invention. Optionally associated with such container(s) can be a notice in the form prescribed by a governmental agency regulating the manufacture, use or sale of pharmaceuticals or biological products, which notice reflects approval by the agency of manufacture, use or sale for human administration.

[0327] Diagnosis and Imaging

[0328] Labeled antibodies, and derivatives and analogs thereof, which specifically bind to a polypeptide of interest can be used for diagnostic purposes to detect, diagnose, or monitor diseases, disorders, and/or conditions associated with the aberrant expression and/or activity of a polypeptide of the invention. The invention provides for the detection of aberrant expression of a polypeptide of interest, comprising (a) assaying the expression of the polypeptide of interest in cells or body fluid of an individual using one or more antibodies specific to the polypeptide interest and (b) comparing the level of gene expression with a standard gene expression level, whereby an increase or decrease in the assayed polypeptide gene expression level compared to the standard expression level is indicative of aberrant expression.

[0329] The invention provides a diagnostic assay for diagnosing a disorder, comprising (a) assaying the expression of the polypeptide of interest in cells or body fluid of an individual using one or more antibodies specific to the polypeptide interest and (b) comparing the level of gene expression with a standard gene expression level, whereby an increase or decrease in the assayed polypeptide gene expression level compared to the standard expression level is indicative of a particular disorder. With respect to cancer, the presence of a relatively high amount of transcript in biopsied tissue from an individual may indicate a predisposition for the development of the disease, or may provide a means for detecting the disease prior to the appearance of actual clinical symptoms. A more definitive diagnosis of this type may allow health professionals to employ preventative measures or aggressive treatment earlier thereby preventing the development or further progression of the cancer.

[0330] Antibodies of the invention can be used to assay protein levels in a biological sample using classical immunohistological methods known to those of skill in the art (e.g., see Jalkanen et al., J. Cell. Biol. 101:976-985 (1985); Jalkanen et al., J. Cell . Biol. 105:3087-3096 (1987)). Other antibody-based methods useful for detecting protein gene expression include immunoassays, such as the enzyme linked immunosorbent assay (ELISA) and the radioimmunoassay (RIA). Suitable antibody assay labels are known in the art and include enzyme labels, such as, glucose oxidase; radioisotopes, such as iodine (125I, 121I), carbon (14C), sulfur (35S), tritium (3H), indium (112In), and technetium (99Tc); luminescent labels, such as luminol; and fluorescent labels, such as fluorescein and rhodamine, and biotin.

[0331] One facet of the invention is the detection and diagnosis of a disease or disorder associated with aberrant expression of a polypeptide of interest in an animal, preferably a mammal and most preferably a human. In one embodiment, diagnosis comprises: a) administering (for example, parenterally, subcutaneously, or intraperitoneally) to a subject an effective amount of a labeled molecule which specifically binds to the polypeptide of interest; b) waiting for a time interval following the administering for permitting the labeled molecule to preferentially concentrate at sites in the subject where the polypeptide is expressed (and for unbound labeled molecule to be cleared to background level); c) determining background level; and d) detecting the labeled molecule in the subject, such that detection of labeled molecule above the background level indicates that the subject has a particular disease or disorder associated with aberrant expression of the polypeptide of interest. Background level can be determined by various methods including, comparing the amount of labeled molecule detected to a standard value previously determined for a particular system.

[0332] It will be understood in the art that the size of the subject and the imaging system used will determine the quantity of imaging moiety needed to produce diagnostic images. In the case of a radioisotope moiety, for a human subject, the quantity of radioactivity injected will normally range from about 5 to 20 millicuries of 99 mTc. The labeled antibody or antibody fragment will then preferentially accumulate at the location of cells which contain the specific protein. In vivo tumor imaging is described in S. W. Burchiel et al., “Immunopharmacokinetics of Radiolabeled Antibodies and Their Fragments.” (Chapter 13 in Tumor Imaging: The Radiochemical Detection of Cancer, S. W. Burchiel and B. A. Rhodes, eds., Masson Publishing Inc. (1982)).

[0333] Depending on several variables, including the type of label used and the mode of administration, the time interval following the administration for permitting the labeled molecule to preferentially concentrate at sites in the subject and for unbound labeled molecule to be cleared to background level is 6 to 48 hours or 6 to 24 hours or 6 to 12 hours. In another embodiment the time interval following administration is 5 to 20 days or 5 to 10 days.

[0334] In an embodiment, monitoring of the disease or disorder is carried out by repeating the method for diagnosing the disease or disease, for example, one month after initial diagnosis, six months after initial diagnosis, one year after initial diagnosis, etc.

[0335] Presence of the labeled molecule can be detected in the patient using methods known in the art for in vivo scanning. These methods depend upon the type of label used. Skilled artisans will be able to determine the appropriate method for detecting a particular label. Methods and devices that may be used in the diagnostic methods of the invention include, but are not limited to, computed tomography (CT), whole body scan such as position emission tomography (PET), magnetic resonance imaging (MRI), and sonography.

[0336] In a specific embodiment, the molecule is labeled with a radioisotope and is detected in the patient using a radiation responsive surgical instrument (Thurston et al., U.S. Pat. No. 5,441,050). In another embodiment, the molecule is labeled with a fluorescent compound and is detected in the patient using a fluorescence responsive scanning instrument. In another embodiment, the molecule is labeled with a positron emitting metal and is detected in the patent using positron emission-tomography. In yet another embodiment, the molecule is labeled with a paramagnetic label and is detected in a patient using magnetic resonance imaging (MRI).

[0337] Kits

[0338] The present invention provides kits that can be used in the above methods. In one embodiment, a kit comprises an antibody of the invention, preferably a purified antibody, in one or more containers. In a specific embodiment, the kits of the present invention contain a substantially isolated polypeptide comprising an epitope which is specifically immunoreactive with an antibody included in the kit. Preferably, the kits of the present invention further comprise a control antibody which does not react with the polypeptide of interest. In another specific embodiment, the kits of the present invention contain a means for detecting the binding of an antibody to a polypeptide of interest (e.g., the antibody may be conjugated to a detectable substrate such as a fluorescent compound, an enzymatic substrate, a radioactive compound or a luminescent compound, or a second antibody which recognizes the first antibody may be conjugated to a detectable substrate).

[0339] In another specific embodiment of the present invention, the kit is a diagnostic kit for use in screening serum containing antibodies specific against proliferative and/or cancerous polynucleotides and polypeptides. Such a kit may include a control antibody that does not react with the polypeptide of interest. Such a kit may include a substantially isolated polypeptide antigen comprising an epitope which is specifically immunoreactive with at least one anti-polypeptide antigen antibody. Further, such a kit includes means for detecting the binding of said antibody to the antigen (e.g., the antibody may be conjugated to a fluorescent compound such as fluorescein or rhodamine which can be detected by flow cytometry). In specific embodiments, the kit may include a recombinantly produced or chemically synthesized polypeptide antigen. The polypeptide antigen of the kit may also be attached to a solid support.

[0340] In a more specific embodiment the detecting means of the above-described kit includes a solid support to which said polypeptide antigen is attached. Such a kit may also include a non-attached reporter-labeled anti-human antibody. In this embodiment, binding of the antibody to the polypeptide antigen can be detected by binding of the said reporter-labeled antibody.

[0341] In an additional embodiment, the invention includes a diagnostic kit for use in screening serum containing antigens of the polypeptide of the invention. The diagnostic kit includes a substantially isolated antibody specifically immunoreactive with polypeptide or polynucleotide antigens, and means for detecting the binding of the polynucleotide or polypeptide antigen to the antibody. In one embodiment, the antibody is attached to a solid support. In a specific embodiment, the antibody may be a monoclonal antibody. The detecting means of the kit may include a second, labeled monoclonal antibody. Alternatively, or in addition, the detecting means may include a labeled, competing antigen.

[0342] In one diagnostic configuration, test serum is reacted with a solid phase reagent having a surface-bound antigen obtained by the methods of the present invention. After binding with specific antigen antibody to the reagent and removing unbound serum components by washing, the reagent is reacted with reporter-labeled anti-human antibody to bind reporter to the reagent in proportion to the amount of bound anti-antigen antibody on the solid support. The reagent is again washed to remove unbound labeled antibody, and the amount of reporter associated with the reagent is determined. Typically, the reporter is an enzyme which is detected by incubating the solid phase in the presence of a suitable fluorometric, luminescent or colorimetric substrate (Sigma, St. Louis, Mo.).

[0343] The solid surface reagent in the above assay is prepared by known techniques for attaching protein material to solid support material, such as polymeric beads, dip sticks, 96-well plate or filter material. These attachment methods generally include non-specific adsorption of the protein to the support or covalent attachment of the protein, typically through a free amine group, to a chemically reactive group on the solid support, such as an activated carboxyl, hydroxyl, or aldehyde group. Alternatively, streptavidin coated plates can be used in conjunction with biotinylated antigen(s).

[0344] Thus, the invention provides an assay system or kit for carrying out this diagnostic method. The kit generally includes a support with surface-bound recombinant antigens, and a reporter-labeled anti-human antibody for detecting surface-bound anti-antigen antibody.

[0345] Uses of the Polynucleotides

[0346] Each of the polynucleotides identified herein can be used in numerous ways as reagents. The following description should be considered exemplary and utilizes known techniques.

[0347] The polynucleotides of the present invention are useful for chromosome identification. There exists an ongoing need to identify new chromosome markers, since few chromosome marking reagents, based on actual sequence data (repeat polymorphisms), are presently available. Each sequence is specifically targeted to and can hybridize with a particular location on an individual human chromosome, thus each polynucleotide of the present invention can routinely be used as a chromosome marker using techniques known in the art. Table 1A, column 9 provides the chromosome location of some of the polynucleotides of the invention.

[0348] Briefly, sequences can be mapped to chromosomes by preparing PCR primers (preferably at least 15 bp (e.g., 15-25 bp) from the sequences shown in SEQ ID NO:X. Primers can optionally be selected using computer analysis so that primers do not span more than one predicted exon in the genomic DNA. These primers are then used for PCR screening of somatic cell hybrids containing individual human chromosomes. Only those hybrids containing the human gene corresponding to SEQ ID NO:X will yield an amplified fragment.

[0349] Similarly, somatic hybrids provide a rapid method of PCR mapping the polynucleotides to particular chromosomes. Three or more clones can be assigned per day using a single thermal cycler. Moreover, sublocalization of the polynucleotides can be achieved with panels of specific chromosome fragments. Other gene mapping strategies that can be used include in situ hybridization, prescreening with labeled flow-sorted chromosomes, preselection by hybridization to construct chromosome specific-cDNA libraries, and computer mapping techniques (See, e.g., Shuler, Trends Biotechnol 16:456-459 (1998) which is hereby incorporated by reference in its entirety).

[0350] Precise chromosomal location of the polynucleotides can also be achieved using fluorescence in situ hybridization (FISH) of a metaphase chromosomal spread. This technique uses polynucleotides as short as 500 or 600 bases; however, polynucleotides 2,000-4,000 bp are preferred. For a review of this technique, see Verma et al., “Human Chromosomes: a Manual of Basic Techniques,” Pergamon Press, New York (1988).

[0351] For chromosome mapping, the polynucleotides can be used individually (to mark a single chromosome or a single site on that chromosome) or in panels (for marking multiple sites and/or multiple chromosomes).

[0352] Thus, the present invention also provides a method for chromosomal localization which involves (a) preparing PCR primers from the polynucleotide sequences in Table 1A and/or Table 2 and SEQ ID NO:X and (b) screening somatic cell hybrids containing individual chromosomes.

[0353] The polynucleotides of the present invention would likewise be useful for radiation hybrid mapping, HAPPY mapping, and long range restriction mapping. For a review of these techniques and others known in the art, see, e.g. Dear, “Genome Mapping: A Practical Approach,” IRL Press at Oxford University Press, London (1997); Aydin, J. Mol. Med. 77:691-694 (1999); Hacia et al., Mol. Psychiatry 3:483-492 (1998); Herrick et al., Chromosome Res. 7:409-423 (1999); Hamilton et al., Methods Cell Biol. 62:265-280 (2000); and/or Ott, J. Hered. 90:68-70 (1999) each of which is hereby incorporated by reference in its entirety.

[0354] Once a polynucleotide has been mapped to a precise chromosomal location, the physical position of the polynucleotide can be used in linkage analysis. Linkage analysis establishes coinheritance between a chromosomal location and presentation of a particular disease. (Disease mapping data are found, for example, in V. McKusick, Mendelian Inheritance in Man (available on line through Johns Hopkins University Welch Medical Library)). Column 10 of Table 1A provides an OMIM reference identification number of diseases associated with the cytologic band disclosed in column 9 of Table 1A, as determined using techniques described herein and by reference to Table 5. Assuming 1 megabase mapping resolution and one gene per 20 kb, a cDNA precisely localized to a chromosomal region associated with the disease could be one of 50-500 potential causative genes.

[0355] Thus, once coinheritance is established, differences in a polynucleotide of the invention and the corresponding gene between affected and unaffected individuals can be examined. First, visible structural alterations in the chromosomes, such as deletions or translocations, are examined in chromosome spreads or by PCR. If no structural alterations exist, the presence of point mutations are ascertained. Mutations observed in some or all affected individuals, but not in normal individuals, indicates that the mutation may cause the disease. However, complete sequencing of the polypeptide and the corresponding gene from several normal individuals is required to distinguish the mutation from a polymorphism. If a new polymorphism is identified, this polymorphic polypeptide can be used for further linkage analysis.

[0356] Furthermore, increased or decreased expression of the gene in affected individuals as compared to unaffected individuals can be assessed using the polynucleotides of the invention. Any of these alterations (altered expression, chromosomal rearrangement, or mutation) can be used as a diagnostic or prognostic marker. Diagnostic and prognostic methods, kits and reagents encompassed by the present invention are briefly described below and more thoroughly elsewhere herein (see e.g., the sections labeled “Antibodies”, “Diagnostic Assays”, and “Methods for Detecting Diseases”).

[0357] Thus, the invention also provides a diagnostic method useful during diagnosis of a disorder, involving measuring the expression level of polynucleotides of the present invention in cells or body fluid from an individual and comparing the measured gene expression level with a standard level of polynucleotide expression level, whereby an increase or decrease in the gene expression level compared to the standard is indicative of a disorder. Additional non-limiting examples of diagnostic methods encompassed by the present invention are more thoroughly described elsewhere herein (see, e.g., Example 12).

[0358] In still another embodiment, the invention includes a kit for analyzing samples for the presence of proliferative and/or cancerous polynucleotides derived from a test subject. In a general embodiment, the kit includes at least one polynucleotide probe containing a nucleotide sequence that will specifically hybridize with a polynucleotide of the invention and a suitable container. In a specific embodiment, the kit includes two polynucleotide probes defining an internal region of the polynucleotide of the invention, where each probe has one strand containing a 31′mer-end internal to the region. In a further embodiment, the probes may be useful as primers for polymerase chain reaction amplification.

[0359] Where a diagnosis of a related disorder, including, for example, diagnosis of a tumor, has already been made according to conventional methods, the present invention is useful as a prognostic indicator, whereby patients exhibiting enhanced or depressed polynucleotide of the invention expression will experience a worse clinical outcome relative to patients expressing the gene at a level nearer the standard level.

[0360] By “measuring the expression level of polynucleotides of the invention” is intended qualitatively or quantitatively measuring or estimating the level of the polypeptide of the invention or the level of the mRNA encoding the polypeptide of the invention in a first biological sample either directly (e.g., by determining or estimating absolute protein level or mRNA level) or relatively (e.g., by comparing to the polypeptide level or mRNA level in a second biological sample). Preferably, the polypeptide level or mRNA level in the first biological sample is measured or estimated and compared to a standard polypeptide level or mRNA level, the standard being taken from a second biological sample obtained from an individual not having the related disorder or being determined by averaging levels from a population of individuals not having a related disorder. As will be appreciated in the art, once a standard polypeptide level or mRNA level is known, it can be used repeatedly as a standard for comparison.

[0361] By “biological sample” is intended any biological sample obtained from an individual, body fluid, cell line, tissue culture, or other source which contains polypeptide of the present invention or the corresponding mRNA. As indicated, biological samples include body fluids (such as semen, lymph, vaginal pool, sera, plasma, urine, synovial fluid and spinal fluid) which contain the polypeptide of the present invention, and tissue sources found to express the polypeptide of the present invention. Methods for obtaining tissue biopsies and body fluids from mammals are well known in the art. Where the biological sample is to include mRNA, a tissue biopsy is the preferred source.

[0362] The method(s) provided above may preferably be applied in a diagnostic method and/or kits in which polynucleotides and/or polypeptides of the invention are attached to a solid support. In one exemplary method, the support may be a “gene chip” or a “biological chip” as described in U.S. Pat. Nos. 5,837,832, 5,874,219, and 5,856,174. Further, such a gene chip with polynucleotides of the invention attached may be used to identify polymorphisms between the isolated polynucleotide sequences of the invention, with polynucleotides isolated from a test subject. The knowledge of such polymorphisms (i.e. their location, as well as, their existence) would be beneficial in identifying disease loci for many disorders, such as for example, in neural disorders, immune system disorders, muscular disorders, reproductive disorders, gastrointestinal disorders, pulmonary disorders, digestive disorders, metabolic disorders, cardiovascular disorders, renal disorders, proliferative disorders, and/or cancerous diseases and conditions. Such a method is described in U.S. Pat. Nos. 5,858,659 and 5,856,104. The US Patents referenced supra are hereby incorporated by reference in their entirety herein.

[0363] The present invention encompasses polynucleotides of the present invention that are chemically synthesized, or reproduced as peptide nucleic acids (PNA), or according to other methods known in the art. The use of PNAs would serve as the preferred form if the polynucleotides of the invention are incorporated onto a solid support, or gene chip. For the purposes of the present invention, a peptide nucleic acid (PNA) is a polyamide type of DNA analog and the monomeric units for adenine, guanine, thymine and cytosine are available commercially (Perceptive Biosystems). Certain components of DNA, such as phosphorus, phosphorus oxides, or deoxyribose derivatives, are not present in PNAs. As disclosed by Nielsen et al., Science 254, 1497 (1991); and Egholm et al., Nature 365, 666 (1993), PNAs bind specifically and tightly to complementary DNA strands and are not degraded by nucleases. In fact, PNA binds more strongly to DNA than DNA itself does. This is probably because there is no electrostatic repulsion between the two strands, and also the polyamide backbone is more flexible. Because of this, PNA/DNA duplexes bind under a wider range of stringency conditions than DNA/DNA duplexes, making it easier to perform multiplex hybridization. Smaller probes can be used than with DNA due to the strong binding. In addition, it is more likely that single base mismatches can be determined with PNA/DNA hybridization because a single mismatch in a PNA/DNA 15-mer lowers the melting point (T.sub.m) by 8°-20° C., vs. 4°-16° C. for the DNA/DNA 15-mer duplex. Also, the absence of charge groups in PNA means that hybridization can be done at low ionic strengths and reduce possible interference by salt during the analysis.

[0364] The compounds of the present invention have uses which include, but are not limited to, detecting cancer in mammals. In particular the invention is useful during diagnosis of pathological cell proliferative neoplasias which include, but are not limited to: acute myelogenous leukemias including acute monocytic leukemia, acute myeloblastic leukemia, acute promyelocytic leukemia, acute myelomonocytic leukemia, acute erythroleukemia, acute megakaryocytic leukemia, and acute undifferentiated leukemia, etc.; and chronic myelogenous leukemias including chronic myelomonocytic leukemia, chronic granulocytic leukemia, etc. Preferred mammals include monkeys, apes, cats, dogs, cows, pigs, horses, rabbits and humans. Particularly preferred are humans.

[0365] Pathological cell proliferative disorders are often associated with inappropriate activation of proto-oncogenes. (Gelmann, E. P. et al., “The Etiology of Acute Leukemia: Molecular Genetics and Viral Oncology,” in Neoplastic Diseases of the Blood, Vol 1., Wiernik, P. H. et al. eds., 161-182 (1985)). Neoplasias are now believed to result from the qualitative alteration of a normal cellular gene product, or from the quantitative modification of gene expression by insertion into the chromosome of a viral sequence, by chromosomal translocation of a gene to a more actively transcribed region, or by some other mechanism. (Gelmann et al., supra) It is likely that mutated or altered expression of specific genes is involved in the pathogenesis of some leukemias, among other tissues and cell types. (Gelmann et al., supra) Indeed, the human counterparts of the oncogenes involved in some animal neoplasias have been amplified or translocated in some cases of human leukemia and carcinoma. (Gelmann et al., supra)

[0366] For example, c-myc expression is highly amplified in the non-lymphocytic leukemia cell line HL-60. When HL-60 cells are chemically induced to stop proliferation, the level of c-myc is found to be downregulated. (International Publication Number WO 91/15580). However, it has been shown that exposure of HL-60 cells to a DNA construct that is complementary to the 5′ end of c-myc or c-myb blocks translation of the corresponding mRNAs which downregulates expression of the c-myc or c-myb proteins and causes arrest of cell proliferation and differentiation of the treated cells. (International Publication Number WO 91/15580; Wickstrom et al., Proc. Natl. Acad. Sci. 85:1028 (1988); Anfossi et al., Proc. Natl. Acad. Sci. 86:3379 (1989)). However, the skilled artisan would appreciate the present invention's usefulness is not be limited to treatment, prevention, and/or prognosis of proliferative disorders of cells and tissues of hematopoietic origin, in light of the numerous cells and cell types of varying origins which are known to exhibit proliferative phenotypes.

[0367] In addition to the foregoing, a polynucleotide of the present invention can be used to control gene expression through triple helix formation or through antisense DNA or RNA. Antisense techniques are discussed, for example, in Okano, J. Neurochem. 56: 560 (1991); “Oligodeoxynucleotides as Antisense Inhibitors of Gene Expression, CRC Press, Boca Raton, Fla. (1988). Triple helix formation is discussed in, for instance Lee et al., Nucleic Acids Research 6: 3073 (1979); Cooney et al., Science 241: 456 (1988); and Dervan et al., Science 251: 1360 (1991). Both methods rely on binding of the polynucleotide to a complementary DNA or RNA. For these techniques, preferred polynucleotides are usually oligonucleotides 20 to 40 bases in length and complementary to either the region of the gene involved in transcription (triple helix—see Lee et al., Nucl. Acids Res. 6:3073 (1979); Cooney et al., Science 241:456 (1988); and Dervan et al., Science 251:1360 (1991)) or to the mRNA itself (antisense—Okano, J. Neurochem. 56:560 (1991); Oligodeoxy-nucleotides as Antisense Inhibitors of Gene Expression, CRC Press, Boca Raton, Fla. (1988)). Triple helix formation optimally results in a shut-off of RNA transcription from DNA, while antisense RNA hybridization blocks translation of an mRNA molecule into polypeptide. The oligonucleotide described above can also be delivered to cells such that the antisense RNA or DNA may be expressed in vivo to inhibit production of polypeptide of the present invention antigens. Both techniques are effective in model systems, and the information disclosed herein can be used to design antisense or triple helix polynucleotides in an effort to treat disease, and in particular, for the treatment of proliferative diseases and/or conditions. Non-limiting antisense and triple helix methods encompassed by the present invention are more thoroughly described elsewhere herein (see, e.g., the section labeled “Antisense and Ribozyrne (Antagonists)”).

[0368] Polynucleotides of the present invention are also useful in gene therapy. One goal of gene therapy is to insert a normal gene into an organism having a defective gene, in an effort to correct the genetic defect. The polynucleotides disclosed in the present invention offer a means of targeting such genetic defects in a highly accurate manner. Another goal is to insert a new gene that was not present in the host genome, thereby producing a new trait in the host cell. Additional non-limiting examples of gene therapy methods encompassed by the present invention are more thoroughly described elsewhere herein (see, e.g., the sections labeled “Gene Therapy Methods”, and Examples 16, 17 and 18).

[0369] The polynucleotides are also useful for identifying individuals from minute biological samples. The United States military, for example, is considering the use of restriction fragment length polymorphism (RFLP) for identification of its personnel. In this technique, an individual's genomic DNA is digested with one or more restriction enzymes, and probed on a Southern blot to yield unique bands for identifying personnel. This method does not suffer from the current limitations of “Dog Tags” which can be lost, switched, or stolen, making positive identification difficult. The polynucleotides of the present invention can be used as additional DNA markers for RFLP.

[0370] The polynucleotides of the present invention can also be used as an alternative to RFLP, by determining the actual base-by-base DNA sequence of selected portions of an individual's genome. These sequences can be used to prepare PCR primers for amplifying and isolating such selected DNA, which can then be sequenced. Using this technique, individuals can be identified because each individual will have a unique set of DNA sequences. Once an unique ID database is established for an individual, positive identification of that individual, living or dead, can be made from extremely small tissue samples.

[0371] Forensic biology also benefits from using DNA-based identification techniques as disclosed herein. DNA sequences taken from very small biological samples such as tissues, e.g., hair or skin, or body fluids, e.g., blood, saliva, semen, synovial fluid, amniotic fluid, breast milk, lymph, pulmonary sputum or surfactant, urine, fecal matter, etc., can be amplified using PCR. In one prior art technique, gene sequences amplified from polymorphic loci, such as DQa class II HLA gene, are used in forensic biology to identify individuals. (Erlich, H., PCR Technology, Freeman and Co. (1992)). Once these specific polymorphic loci are amplified, they are digested with one or more restriction enzymes, yielding an identifying set of bands on a Southern blot probed with DNA corresponding to the DQa class II HLA gene. Similarly, polynucleotides of the present invention can be used as polymorphic markers for forensic purposes.

[0372] There is also a need for reagents capable of identifying the source of a particular tissue. Such need arises, for example, in forensics when presented with tissue of unknown origin. Appropriate reagents can comprise, for example, DNA probes or primers prepared from the sequences of the present invention, specific to tissues, including but not limited to those shown in Table 1A. Panels of such reagents can identify tissue by species and/or by organ type. In a similar fashion, these reagents can be used to screen tissue cultures for contamination. Additional non-limiting examples of such uses are further described herein.

[0373] The polynucleotides of the present invention are also useful as hybridization probes for differential identification of the tissue(s) or cell type(s) present in a biological sample. Similarly, polypeptides and antibodies directed to polypeptides of the present invention are useful to provide immunological probes for differential identification of the tissue(s) (e.g., immunohistochemistry assays) or cell type(s) (e.g., immunocytochemistry assays). In addition, for a number of disorders of the above tissues or cells, significantly higher or lower levels of gene expression of the polynucleotides/polypeptides of the present invention may be detected in certain tissues (e.g., tissues expressing polypeptides and/or polynucleotides of the present invention, for example, those disclosed in column 8 of Table A, and/or cancerous and/or wounded tissues) or bodily fluids (e.g., semen, lymph, vaginal pool, serum, plasma, urine, synovial fluid or spinal fluid) taken from an individual having such a disorder, relative to a “standard” gene expression level, i.e., the expression level in healthy tissue from an individual not having the disorder.

[0374] Thus, the invention provides a diagnostic method of a disorder, which involves: (a) assaying gene expression level in cells or body fluid of an individual; (b) comparing the gene expression level with a standard gene expression level, whereby an increase or decrease in the assayed gene expression level compared to the standard expression level is indicative of a disorder.

[0375] In the very least, the polynucleotides of the present invention can be used as molecular weight markers on Southern gels, as diagnostic probes for the presence of a specific mRNA in a particular cell type, as a probe to “subtract-out” known sequences in the process of discovering novel polynucleotides, for selecting and making oligomers for attachment to a “gene chip” or other support, to raise anti-DNA antibodies using DNA immunization techniques, and as an antigen to elicit an immune response.

[0376] Uses of the Polypeptides

[0377] Each of the polypeptides identified herein can be used in numerous ways. The following description should be considered exemplary and utilizes known techniques.

[0378] Polypeptides and antibodies directed to polypeptides of the present invention are useful to provide immunological probes for differential identification of the tissue(s) (e.g., immunohistochemistry assays such as, for example, ABC immunoperoxidase (Hsu et al., J. Histochem. Cytochem. 29:577-580 (1981)) or cell type(s) (e.g., immunocytochemistry assays).

[0379] Antibodies can be used to assay levels of polypeptides encoded by polynucleotides of the invention in a biological sample using classical immunohistological methods known to those of skill in the art (e.g., see Jalkanen, et al., J. Cell. Biol. 101:976-985 (1985); Jalkanen, et al., J. Cell. Biol. 105:3087-3096 (1987)). Other antibody-based methods useful for detecting protein gene expression include immunoassays, such as the enzyme linked immunosorbent assay (ELISA) and the radioimmunoassay (RIA). Suitable antibody assay labels are known in the art and include enzyme labels, such as, glucose oxidase; radioisotopes, such as iodine (¹³¹I, ¹²⁵I, ¹²³I, ¹²¹I), carbon (¹⁴C), sulfur (³⁵S), tritium (³H), indium (^{115m}In, ^{113m}In, ¹¹²In, ¹¹¹In), and technetium (⁹⁹Tc, ^{99m}Tc), thallium (²⁰¹Ti), gallium (⁶⁸Ga, ⁶⁷Ga), palladium (¹⁰³Pd), molybdenum (⁹⁹Mo), xenon (¹³³Xe), fluorine (¹⁸F), ¹⁵³Sm, ¹⁷⁷Lu, ¹⁵⁹Gd, ¹⁴⁹Pm, ¹⁴⁰La, ¹⁷⁵Yb, ¹⁶⁶Ho, ⁹⁰Y, ⁴⁷Sc, ¹⁸⁶Re, ¹⁸⁸Re ¹⁴²Pr, ¹⁰⁵Rh, ⁹⁷Ru; luminescent labels, such as luminol; and fluorescent labels, such as fluorescein and rhodamine, and biotin.

[0380] In addition to assaying levels of polypeptide of the present invention in a biological sample, proteins can also be detected in vivo by imaging. Antibody labels or markers for in vivo imaging of protein include those detectable by X-radiography, NMR or ESR. For X-radiography, suitable labels include radioisotopes such as barium or cesium, which emit detectable radiation but are not overtly harmful to the subject. Suitable markers for NMR and ESR include those with a detectable characteristic spin, such as deuterium, which may be incorporated into the antibody by labeling of nutrients for the relevant hybridoma.

[0381] A protein-specific antibody or antibody fragment which has been labeled with an appropriate detectable imaging moiety, such as a radioisotope (for example, ¹³¹I, ¹¹²In, ^{99m}Tc, (¹³¹I, ¹²⁵I, ¹²³I, ¹²¹I), carbon (¹⁴C), sulfur (³⁵S), tritium (³H), indium (^{115m}In, ^{113m}In, ¹¹²In, ¹¹¹In), and technetium (⁹⁹Tc, ^{99m}Tc), thallium (²⁰¹Ti), gallium (⁶⁸Ga, ⁶⁷Ga), palladium (¹⁰³Pd), molybdenum (⁹⁹Mo), xenon (¹³³Xe), fluorine (¹⁸F, ¹⁵³Sm, ¹⁷⁷Lu, ¹⁵⁹Gd, ¹⁴⁹Pm, ¹⁴⁰La, ¹⁷⁵Yb, ¹⁶⁶Ho, ⁹⁰Y, ⁴⁷Sc, ¹⁸Re, ⁸⁸Re, ⁴²Pr, ¹⁰⁵Rh, ⁹⁷Ru), a radio-opaque substance, or a material detectable by nuclear magnetic resonance, is introduced (for example, parenterally, subcutaneously or intraperitoneally) into the mammal to be examined for immune system disorder. It will be understood in the art that the size of the subject and the imaging system used will determine the quantity of imaging moiety needed to produce diagnostic images. In the case of a radioisotope moiety, for a human subject, the quantity of radioactivity injected will normally range from about 5 to 20 millicuries of ^{99m}Tc. The labeled antibody or antibody fragment will then preferentially accumulate at the location of cells which express the polypeptide encoded by a polynucleotide of the invention. In vivo tumor imaging is described in S. W. Burchiel et al., “Immunopharmacokinetics of Radiolabeled Antibodies and Their Fragments” (Chapter 13 in Tumor Imaging: The Radiochemical Detection of Cancer, S. W. Burchiel and B. A. Rhodes, eds., Masson Publishing Inc. (1982)).

[0382] In one embodiment, the invention provides a method for the specific delivery of compositions of the invention to cells by administering polypeptides of the invention (e.g., polypeptides encoded by polynucleotides of the invention and/or antibodies) that are associated with heterologous polypeptides or nucleic acids. In one example, the invention provides a method for delivering a therapeutic protein into the targeted cell. In another example, the invention provides a method for delivering a single stranded nucleic acid (e.g., antisense or ribozymes) or double stranded nucleic acid (e.g., DNA that can integrate into the cell's genome or replicate episomally and that can be transcribed) into the targeted cell.

[0383] In another embodiment, the invention provides a method for the specific destruction of cells (e.g., the destruction of tumor cells) by administering polypeptides of the invention in association with toxins or cytotoxic prodrugs.

[0384] By “toxin” is meant one or more compounds that bind and activate endogenous cytotoxic effector systems, radioisotopes, holotoxins, modified toxins, catalytic subunits of toxins, or any molecules or enzymes not normally present in or on the surface of a cell that under defined conditions cause the cell's death. Toxins that may be used according to the methods of the invention include, but are not limited to, radioisotopes known in the art, compounds such as, for example, antibodies (or complement fixing containing portions thereof) that bind an inherent or induced endogenous cytotoxic effector system, thymidine kinase, endonuclease, RNAse, alpha toxin, ricin, abrin, Pseudomonas exotoxin A, diphtheria toxin, saporin, momordin, gelonin, pokeweed antiviral protein, alpha-sarcin and cholera toxin. “Toxin” also includes a cytostatic or cytocidal agent, a therapeutic agent or a radioactive metal ion, e.g., alpha-emitters such as, for example, ²¹³Bi, or other radioisotopes such as, for example, ¹⁰³Pd, ¹³³Xe, ¹³¹I, ⁶⁸Ge, ⁵⁷Co, ⁶⁵Zn, ⁸⁵Sr, ³²P, ³⁵S, ⁹⁰Y, ¹⁵³Sm, ¹⁵³Gd, ¹⁶⁹Yb, ⁵¹Cr, ⁵⁴Mn, ⁷⁵Se, ¹¹³Sn, ⁹⁰Yttrium, ¹¹⁷Tin, ¹⁸⁶Rhenium, ¹⁶⁶Holmium, and ¹⁸⁸Rhenium; luminescent labels, such as luminol; and fluorescent labels, such as fluorescein and rhodamine, and biotin. In a specific embodiment, the invention provides a method for the specific destruction of cells (e.g., the destruction of tumor cells) by administering polypeptides of the invention or antibodies of the invention in association with the radioisotope ⁹⁰Y. In another specific embodiment, the invention provides a method for the specific destruction of cells (e.g., the destruction of tumor cells) by administering polypeptides of the invention or antibodies of the invention in association with the radioisotope ¹¹¹In. In a further specific embodiment, the invention provides a method for the specific destruction of cells (e.g., the destruction of tumor cells) by administering polypeptides of the invention or antibodies of the invention in association with the radioisotope ¹³¹I.

[0385] Techniques known in the art may be applied to label polypeptides of the invention (including antibodies). Such techniques include, but are not limited to, the use of bifunctional conjugating agents (see e.g., U.S. Pat. Nos. 5,756,065; 5,714,631; 5,696,239; 5,652,361; 5,505,931; 5,489,425; 5,435,990; 5,428,139; 5,342,604; 5,274,119; 4,994,560; and 5,808,003; the contents of each of which are hereby incorporated by reference in its entirety).

[0386] Thus, the invention provides a diagnostic method of a disorder, which involves (a) assaying the expression level of a polypeptide of the present invention in cells or body fluid of an individual; and (b) comparing the assayed polypeptide expression level with a standard polypeptide expression level, whereby an increase or decrease in the assayed polypeptide expression level compared to the standard expression level is indicative of a disorder. With respect to cancer, the presence of a relatively high amount of transcript in biopsied tissue from an individual may indicate a predisposition for the development of the disease, or may provide a means for detecting the disease prior to the appearance of actual clinical symptoms. A more definitive diagnosis of this type may allow health professionals to employ preventative measures or aggressive treatment earlier thereby preventing the development or further progression of the cancer.

[0387] Moreover, polypeptides of the present invention can be used to treat or prevent diseases or conditions such as, for example, neural disorders, immune system disorders, muscular disorders, reproductive disorders, gastrointestinal disorders, pulmonary disorders, cardiovascular disorders, renal disorders, proliferative disorders, and/or cancerous diseases and conditions. For example, patients can be administered a polypeptide of the present invention in an effort to replace absent or decreased levels of the polypeptide (e.g., insulin), to supplement absent or decreased levels of a different polypeptide (e.g., hemoglobin S for hemoglobin B, SOD, catalase, DNA repair proteins), to inhibit the activity of a polypeptide (e.g., an oncogene or tumor supressor), to activate the activity of a polypeptide (e.g., by binding to a receptor), to reduce the activity of a membrane bound receptor by competing with it for free ligand (e.g., soluble TNF receptors used in reducing inflammation), or to bring about a desired response (e.g., blood vessel growth inhibition, enhancement of the immune response to proliferative cells or tissues).

[0388] Similarly, antibodies directed to a polypeptide of the present invention can also be used to treat disease (as described supra, and elsewhere herein). For example, administration of an antibody directed to a polypeptide of the present invention can bind, and/or neutralize the polypeptide, and/or reduce overproduction of the polypeptide. Similarly, administration of an antibody can activate the polypeptide, such as by binding to a polypeptide bound to a membrane (receptor).

[0389] At the very least, the polypeptides of the present invention can be used as molecular weight markers on SDS-PAGE gels or on molecular sieve gel filtration columns using methods well known to those of skill in the art. Polypeptides can also be used to raise antibodies, which in turn are used to measure protein expression from a recombinant cell, as a way of assessing transformation of the host cell. Moreover, the polypeptides of the present invention can be used to test the biological activities described herein.

[0390] Diagnostic Assays

[0391] The compounds of the present invention are useful for diagnosis, treatment, prevention and/or prognosis of various disorders in mammals, preferably humans. Such disorders include, but are not limited to, those described herein under the section heading “Biological Activities”.

[0392] For a number of disorders, substantially altered (increased or decreased) levels of gene expression can be detected in tissues, cells or bodily fluids (e.g., sera, plasma, urine, semen, synovial fluid or spinal fluid) taken from an individual having such a disorder, relative to a “standard” gene expression level, that is, the expression level in tissues or bodily fluids from an individual not having the disorder. Thus, the invention provides a diagnostic method useful during diagnosis of a disorder, which involves measuring the expression level of the gene encoding the polypeptide in tissues, cells or body fluid from an individual and comparing the measured gene expression level with a standard gene expression level, whereby an increase or decrease in the gene expression level(s) compared to the standard is indicative of a disorder. These diagnostic assays may be performed in vivo or in vitro, such as, for example, on blood samples, biopsy tissue or autopsy tissue.

[0393] The present invention is also useful as a prognostic indicator, whereby patients exhibiting enhanced or depressed gene expression will experience a worse clinical outcome relative to patients expressing the gene at a level nearer the standard level.

[0394] In certain embodiments, a polypeptide of the invention, or polynucleotides, antibodies, agonists, or antagonists corresponding to that polypeptide, may be used to diagnose and/or prognose diseases and/or disorders associated with the tissue(s) in which the polypeptide of the invention is expressed, including one, two, three, four, five, or more tissues disclosed in Table 1A, column 8 (Tissue Distribution Library Code).

[0395] By “assaying the expression level of the gene encoding the polypeptide” is intended qualitatively or quantitatively measuring or estimating the level of the polypeptide of the invention or the level of the mRNA encoding the polypeptide of the invention in a first biological sample either directly (e.g., by determining or estimating absolute protein level or mRNA level) or relatively (e.g., by comparing to the polypeptide level or mRNA level in a second biological sample). Preferably, the polypeptide expression level or mRNA level in the first biological sample is measured or estimated and compared to a standard polypeptide level or mRNA level, the standard being taken from a second biological sample obtained from an individual not having the disorder or being determined by averaging levels from a population of individuals not having the disorder. As will be appreciated in the art, once a standard polypeptide level or mRNA level is known, it can be used repeatedly as a standard for comparison.

[0396] By “biological sample” is intended any biological sample obtained from an individual, cell line, tissue culture, or other source containing polypeptides of the invention (including portions thereof) or mRNA. As indicated, biological samples include body fluids (such as sera, plasma, urine, synovial fluid and spinal fluid) and tissue sources found to express the full length or fragments thereof of a polypeptide or mRNA. Methods for obtaining tissue biopsies and body fluids from mammals are well known in the art. Where the biological sample is to include mRNA, a tissue biopsy is the preferred source.

[0397] Total cellular RNA can be isolated from a biological sample using any suitable technique such as the single-step guanidinium-thiocyanate-phenol-chloroform method described in Chomczynski and Sacchi, Anal. Biochem. 162:156-159 (1987). Levels of mRNA encoding the polypeptides of the invention are then assayed using any appropriate method. These include Northern blot analysis, S1 nuclease mapping, the polymerase chain reaction (PCR), reverse transcription in combination with the polymerase chain reaction (RT-PCR), and reverse transcription in combination with the ligase chain reaction (RT-LCR).

[0398] The present invention also relates to diagnostic assays such as quantitative and diagnostic assays for detecting levels of polypeptides of the invention, in a biological sample (e.g., cells and tissues), including determination of normal and abnormal levels of polypeptides. Thus, for instance, a diagnostic assay in accordance with the invention for detecting over-expression of polypeptides of the invention compared to normal control tissue samples may be used to detect the presence of tumors. Assay techniques that can be used to determine levels of a polypeptide, such as a polypeptide of the present invention in a sample derived from a host are well-known to those of skill in the art. Such assay methods include radioimmunoassays, competitive-binding assays, Western Blot analysis and ELISA assays. Assaying polypeptide levels in a biological sample can occur using any art-known method.

[0399] Assaying polypeptide levels in a biological sample can occur using antibody-based techniques. For example, polypeptide expression in tissues can be studied with classical immunohistological methods (Jalkanen et al., J. Cell. Biol. 101:976-985 (1985); Jalkanen, M., et al., J. Cell . Biol. 105:3087-3096 (1987)). Other antibody-based methods useful for detecting polypeptide gene expression include immunoassays, such as the enzyme linked immunosorbent assay (ELISA) and the radioimmunoassay (RIA). Suitable antibody assay labels are known in the art and include enzyme labels, such as, glucose oxidase, and radioisotopes, such as iodine (¹²⁵I, ¹²¹I), carbon (¹⁴C), sulfur (³⁵S), tritium (³H), indium (¹¹²In), and technetium (^{99m}Tc), and fluorescent labels, such as fluorescein and rhodamine, and biotin.

[0400] The tissue or cell type to be analyzed will generally include those which are known, or suspected, to express the gene of inteest (such as, for example, cancer). The protein isolation methods employed herein may, for example, be such as those described in Harlow and Lane (Harlow, E. and Lane, D., 1988, “Antibodies: A Laboratory Manual”, Cold Spring Harbor Laboratory Press, Cold Spring Harbor, N.Y.), which is incorporated herein by reference in its entirety. The isolated cells can be derived from cell culture or from a patient. The analysis of cells taken from culture may be a necessary step in the assessment of cells that could be used as part of a cell-based gene therapy technique or, alternatively, to test the effect of compounds on the expression of the gene.

[0401] For example, antibodies, or fragments of antibodies, such as those described herein, may be used to quantitatively or qualitatively detect the presence of gene products or conserved variants or peptide fragments thereof. This can be accomplished, for example, by immunofluorescence techniques employing a fluorescently labeled antibody coupled with light microscopic, flow cytometric, or fluorimetric detection.

[0402] In a preferred embodiment, antibodies, or fragments of antibodies directed to any one or all of the predicted epitope domains of the polypeptides of the invention (shown in column 7 of Table 1A) may be used to quantitatively or qualitatively detect the presence of gene products or conserved variants or peptide fragments thereof. This can be accomplished, for example, by immunofluorescence techniques employing a fluorescently labeled antibody coupled with light microscopic, flow cytometric, or fluorimetric detection.

[0403] In an additional preferred embodiment, antibodies, or fragments of antibodies directed to a conformational epitope of a polypeptide of the invention may be used to quantitatively or qualitatively detect the presence of gene products or conserved variants or peptide fragments thereof. This can be accomplished, for example, by immunofluorescence techniques employing a fluorescently labeled antibody coupled with light microscopic, flow cytometric, or fluorimetric detection.

[0404] The antibodies (or fragments thereof), and/or polypeptides of the present invention may, additionally, be employed histologically, as in immunofluorescence, immunoelectron microscopy or non-immunological assays, for in situ detection of gene products or conserved variants or peptide fragments thereof. In situ detection may be accomplished by removing a histological specimen from a patient, and applying thereto a labeled antibody or polypeptide of the present invention. The antibody (or fragment thereof) or polypeptide is preferably applied by overlaying the labeled antibody (or fragment) onto a biological sample. Through the use of such a procedure, it is possible to determine not only the presence of the gene product, or conserved variants or peptide fragments, or polypeptide binding, but also its distribution in the examined tissue. Using the present invention, those of ordinary skill will readily perceive that any of a wide variety of histological methods (such as staining procedures) can be modified in order to achieve such in situ detection.

[0405] Immunoassays and non-immunoassays for gene products or conserved variants or peptide fragments thereof will typically comprise incubating a sample, such as a biological fluid, a tissue extract, freshly harvested cells, or lysates of cells which have been incubated in cell culture, in the presence of a detectably labeled antibody capable of binding gene products or conserved variants or peptide fragments thereof, and detecting the bound antibody by any of a number of techniques well-known in the art.

[0406] The biological sample may be brought in contact with and immobilized onto a solid phase support or carrier such as nitrocellulose, or other solid support which is capable of immobilizing cells, cell particles or soluble proteins. The support may then be washed with suitable buffers followed by treatment with the detectably labeled antibody or detectable polypeptide of the invention. The solid phase support may then be washed with the buffer a second time to remove unbound antibody or polypeptide. Optionally the antibody is subsequently labeled. The amount of bound label on solid support may then be detected by conventional means.

[0407] By “solid phase support or carrier” is intended any support capable of binding an antigen or an antibody. Well-known supports or carriers include glass, polystyrene, polypropylene, polyethylene, dextran, nylon, amylases, natural and modified celluloses, polyacrylamides, gabbros, and magnetite. The nature of the carrier can be either soluble to some extent or insoluble for the purposes of the present invention. The support material may have virtually any possible structural configuration so long as the coupled molecule is capable of binding to an antigen or antibody. Thus, the support configuration may be spherical, as in a bead, or cylindrical, as in the inside surface of a test tube, or the external surface of a rod. Alternatively, the surface may be flat such as a sheet, test strip, etc. Preferred supports include polystyrene beads. Those skilled in the art will know many other suitable carriers for binding antibody or antigen, or will be able to ascertain the same by use of routine experimentation.

[0408] The binding activity of a given lot of antibody or antigen polypeptide may be determined according to well known methods. Those skilled in the art will be able to determine operative and optimal assay conditions for each determination by employing routine experimentation.

[0409] In addition to assaying polypeptide levels or polynucleotide levels in a biological sample obtained from an individual, polypeptide or polynucleotide can also be detected in vivo by imaging. For example, in one embodiment of the invention, polypeptides and/or antibodies of the invention are used to image diseased cells, such as neoplasms. In another embodiment, polynucleotides of the invention (e.g., polynucleotides complementary to all or a portion of an mRNA) and/or antibodies (e.g., antibodies directed to any one or a combination of the epitopes of a polypeptide of the invention, antibodies directed to a conformational epitope of a polypeptide of the invention, or antibodies directed to the full length polypeptide expressed on the cell surface of a mammalian cell) are used to image diseased or neoplastic cells.

[0410] Antibody labels or markers for in vivo imaging of polypeptides of the invention include those detectable by X-radiography, NMR, MRI, CAT-scans or ESR. For X-radiography, suitable labels include radioisotopes such as barium or cesium, which emit detectable radiation but are not overtly harmful to the subject. Suitable markers for NMR and ESR include those with a detectable characteristic spin, such as deuterium, which may be incorporated into the antibody by labeling of nutrients for the relevant hybridoma. Where in vivo imaging is used to detect enhanced levels of polypeptides for diagnosis in humans, it may be preferable to use human antibodies or “humanized” chimeric monoclonal antibodies. Such antibodies can be produced using techniques described herein or otherwise known in the art. For example methods for producing chimeric antibodies are known in the art. See, for review, Morrison, Science 229:1202 (1985); Oi et al., BioTechniques 4:214 (1986); Cabilly et al., U.S. Pat. No. 4,816,567; Taniguchi et al., EP 171496; Morrison et al., EP 173494; Neuberger et al., WO 8601533; Robinson et al., WO 8702671; Boulianne et al., Nature 312:643 (1984); Neuberger et al., Nature 314:268 (1985).

[0411] Additionally, any polypeptides of the invention whose presence can be detected, can be administered. For example, polypeptides of the invention labeled with a radio-opaque or other appropriate compound can be administered and visualized in vivo, as discussed, above for labeled antibodies. Further, such polypeptides can be utilized for in vitro diagnostic procedures.

[0412] A polypeptide-specific antibody or antibody fragment which has been labeled with an appropriate detectable imaging moiety, such as a radioisotope (for example, ¹³¹I, ¹¹²In, ^{99m}Tc), a radio-opaque substance, or a material detectable by nuclear magnetic resonance, is introduced (for example, parenterally, subcutaneously or intraperitoneally) into the mammal to be examined for a disorder. It will be understood in the art that the size of the subject and the imaging system used will determine the quantity of imaging moiety needed to produce diagnostic images. In the case of a radioisotope moiety, for a human subject, the quantity of radioactivity injected will normally range from about 5 to 20 millicuries of ^{99m}Tc. The labeled antibody or antibody fragment will then preferentially accumulate at the location of cells which contain the antigenic protein. In vivo tumor imaging is described in S. W. Burchiel et al., “Immunopharmacokinetics of Radiolabeled Antibodies and Their Fragments” (Chapter 13 in Tumor Imaging: The Radiochemical Detection of Cancer, S. W. Burchiel and B. A. Rhodes, eds., Masson Publishing Inc. (1982)).

[0413] With respect to antibodies, one of the ways in which an antibody of the present invention can be detectably labeled is by linking the same to a reporter enzyme and using the linked product in an enzyme immunoassay (EIA) (Voller, A., “The Enzyme Linked Immunosorbent Assay (ELISA)”, 1978, Diagnostic Horizons 2:1-7, Microbiological Associates Quarterly Publication, Walkersville, Md.); Voller et al., J. Clin. Pathol. 31:507-520 (1978); Butler, J. E., Meth. Enzymol. 73:482-523 (1981); Maggio, E. (ed.), 1980, Enzyme Immunoassay, CRC Press, Boca Raton, Fla.,; Ishikawa, E. et al., (eds.), 1981, Enzyme Immunoassay, Kgaku Shoin, Tokyo). The reporter enzyme which is bound to the antibody will react with an appropriate substrate, preferably a chromogenic substrate, in such a manner as to produce a chemical moiety which can be detected, for example, by spectrophotometric, fluorimetric or by visual means. Reporter enzymes which can be used to detectably label the antibody include, but are not limited to, malate dehydrogenase, staphylococcal nuclease, delta-5-steroid isomerase, yeast alcohol dehydrogenase, alpha-glycerophosphate, dehydrogenase, triose phosphate isomerase, horseradish peroxidase, alkaline phosphatase, asparaginase, glucose oxidase, beta-galactosidase, ribonuclease, urease, catalase, glucose-6-phosphate dehydrogenase, glucoamylase and acetylcholinesterase. Additionally, the detection can be accomplished by colorimetric methods which employ a chromogenic substrate for the reporter enzyme. Detection may also be accomplished by visual comparison of the extent of enzymatic reaction of a substrate in comparison with similarly prepared standards.

[0414] Detection may also be accomplished using any of a variety of other immunoassays. For example, by radioactively labeling the antibodies or antibody fragments, it is possible to detect polypeptides through the use of a radioimmunoassay (RIA) (see, for example, Weintraub, B., Principles of Radioimmunoassays, Seventh Training Course on Radioligand Assay Techniques, The Endocrine Society, March, 1986, which is incorporated by reference herein). The radioactive isotope can be detected by means including, but not limited to, a gamma counter, a scintillation counter, or autoradiography.

[0415] It is also possible to label the antibody with a fluorescent compound. When the fluorescently labeled antibody is exposed to light of the proper wave length, its presence can then be detected due to fluorescence. Among the most commonly used fluorescent labeling compounds are fluorescein isothiocyanate, rhodamine, phycoerythrin, phycocyanin, allophycocyanin, ophthaldehyde and fluorescamine.

[0416] The antibody can also be detectably labeled using fluorescence emitting metals such as ¹⁵²Eu, or others of the lanthamide series. These metals can be attached to the antibody using such metal chelating groups as diethylenetriaminepentacetic acid (DTPA) or ethylenediaminetetraacetic acid (EDTA).

[0417] The antibody also can be detectably labeled by coupling it to a chemiluminescent compound. The presence of the chemiluminescent-tagged antibody is then determined by detecting the presence of luminescence that arises during the course of a chemical reaction. Examples of particularly useful chemiluminescent labeling compounds are luminol, isoluminol, theromatic acridinium ester, imidazole, acridinium salt and oxalate ester.

[0418] Likewise, a bioluminescent compound may be used to label the antibody of the present invention. Bioluminescence is a type of chemiluminescence found in biological systems in, which a catalytic protein increases the efficiency of the chemiluminescent reaction. The presence of a bioluminescent protein is determined by detecting the presence of luminescence. Important bioluminescent compounds for purposes of labeling are luciferin, luciferase and aequorin.

[0419] Methods for Detecting Diseases

[0420] In general, a disease may be detected in a patient based on the presence of one or more proteins of the invention and/or polynucleotides encoding such proteins in a biological sample (for example, blood, sera, urine, and/or tumor biopsies) obtained from the patient. In other words, such proteins may be used as markers to indicate the presence or absence of a disease or disorder, including cancer and/or as described elsewhere herein. In addition, such proteins may be useful for the detection of other diseases and cancers. The binding agents provided herein generally permit detection of the level of antigen that binds to the agent in the biological sample. Polynucleotide primers and probes may be used to detect the level of mRNA encoding polypeptides of the invention, which is also indicative of the presence or absence of a disease or disorder, including cancer. In general, polypeptides of the invention should be present at a level that is at least three fold higher in diseased tissue than in normal tissue.

[0421] There are a variety of assay formats known to those of ordinary skill in the art for using a binding agent to detect polypeptide markers in a sample. See, e.g., Harlow and Lane, supra. In general, the presence or absence of a disease in a patient may be determined by (a) contacting a biological sample obtained from a patient with a binding agent; (b) detecting in the sample a level of polypeptide that binds to the binding agent; and (c) comparing the level of polypeptide with a predetermined cut-off value.

[0422] In a preferred embodiment, the assay involves the use of a binding agent(s) immobilized on a solid support to bind to and remove the polypeptide of the invention from the remainder of the sample. The bound polypeptide may then be detected using a detection reagent that contains a reporter group and specifically binds to the binding agent/polypeptide complex. Such detection reagents may comprise, for example, a binding agent that specifically binds to the polypeptide or an antibody or other agent that specifically binds to the binding agent, such as an anti-immunoglobulin, protein G, protein A or a lectin. Alternatively, a competitive assay may be utilized, in which a polypeptide is labeled with a reporter group and allowed to bind to the immobilized binding agent after incubation of the binding agent with the sample. The extent to which components of the sample inhibit the binding of the labeled polypeptide to the binding agent is indicative of the reactivity of the sample with the immobilized binding agent. Suitable polypeptides for use within such assays include polypeptides of the invention and portions thereof, or antibodies, to which the binding agent binds, as described above.

[0423] The solid support may be any material known to those of skill in the art to which polypeptides of the invention may be attached. For example, the solid support may be a test well in a microtiter plate or a nitrocellulose or other suitable membrane. Alternatively, the support may be a bead or disc, such as glass fiberglass, latex or a plastic material such as polystyrene or polyvinylchloride. The support may also be a magnetic particle or a fiber optic sensor, such as those disclosed, for example, in U.S. Pat. No. 5,359,681. The binding agent may be immobilized on the solid support using a variety of techniques known to those of skill in the art, which are amply described in the patent and scientific literature. In the context of the present invention, the term “immobilization” refers to both noncovalent association, such as adsorption, and covalent attachment (which may be a direct linkage between the agent and functional groups on the support or may be a linkage by way of a cross-linking agent). Immobilization by adsorption to a well in a microtiter plate or to a membrane is preferred. In such cases, adsorption may be achieved by contacting the binding agent, in a suitable buffer, with the solid support for the suitable amount of time. The contact time varies with temperature, but is typically between about 1 hour and about 1 day. In general, contacting a well of plastic microtiter plate (such as polystyrene or polyvinylchloride) with an amount of binding agent ranging from about 10 ng to about 10 ug, and preferably about 100 ng to about 1 ug, is sufficient to immobilize an adequate amount of binding agent.

[0424] Covalent attachment of binding agent to a solid support may generally be achieved by first reacting the support with a bifunctional reagent that will react with both the support and a functional group, such as a hydroxyl or amino group, on the binding agent. For example, the binding agent may be covalently attached to supports having an appropriate polymer coating using benzoquinone or by condensation of an aldehyde group on the support with an amine and an active hydrogen on the binding partner (see, e.g., Pierce Immunotechnology Catalog and Handbook, 1991, at A12-A13).

[0425] Gene Therapy Methods

[0426] Also encompassed by the invention are gene therapy methods for treating or preventing disorders, diseases and conditions. The gene therapy methods relate to the introduction of nucleic acid (DNA, RNA and antisense DNA or RNA) sequences into an animal to achieve expression of the polypeptide of the present invention. This method requires a polynucleotide which codes for a polypeptide of the present invention operatively linked to a promoter and any other genetic elements necessary for the expression of the polypeptide by the target tissue. Such gene therapy and delivery techniques are known in the art, see, for example, WO90/11092, which is herein incorporated by reference.

[0427] Thus, for example, cells from a patient may be engineered with a polynucleotide (DNA or RNA) comprising a promoter operably linked to a polynucleotide of the present invention ex vivo, with the engineered cells then being provided to a patient to be treated with the polypeptide of the present invention. Such methods are well-known in the art. For example, see Belldegrun, A., et al., J. Natl. Cancer Inst. 85: 207-216 (1993); Ferrantini, M. et al., Cancer Research 53: 1107-1112 (1993); Ferrantini, M. et al., J. Immunology 153: 4604-4615 (1994); Kaido, T., et al., Int. J. Cancer 60: 221-229 (1995); Ogura, H., et al., Cancer Research 50: 5102-5106 (1990); Santodonato, L., et al., Human Gene Therapy 7:1-10 (1996); Santodonato, L., et al., Gene Therapy 4:1246-1255 (1997); and Zbang, J.-F. et al., Cancer Gene Therapy 3: 31-38 (1996)), which are herein incorporated by reference. In one embodiment, the cells which are engineered are arterial cells. The arterial cells may be reintroduced into the patient through direct injection to the artery, the tissues surrounding the artery, or through catheter injection.

[0428] As discussed in more detail below, the polynucleotide constructs can be delivered by any method that delivers injectable materials to the cells of an animal, such as, injection into the interstitial space of tissues (heart, muscle, skin, lung, liver, and the like). The polynucleotide constructs may be delivered in a pharmaceutically acceptable liquid or aqueous carrier.

[0429] In one embodiment, the polynucleotide of the present invention is delivered as a naked polynucleotide. The term “naked” polynucleotide, DNA or RNA refers to sequences that are free from any delivery vehicle that acts to assist, promote or facilitate entry into the cell, including viral sequences, viral particles, liposome formulations, lipofectin or precipitating agents and the like. However, the polynucleotide of the present invention can also be delivered in liposome formulations and lipofectin formulations and the like can be prepared by methods well known to those skilled in the art. Such methods are described, for example, in U.S. Pat. Nos. 5,593,972, 5,589,466, and 5,580,859, which are herein incorporated by reference.

[0430] The polynucleotide vector constructs used in the gene therapy method are preferably constructs that will not integrate into the host genome nor will they contain sequences that allow for replication. Appropriate vectors include pWLNEO, pSV2CAT, pOG44, pXT1 and pSG available from Stratagene; pSVK3, pBPV, pMSG and pSVL available from Pharmacia; and pEF1/V5, pcDNA3.1, and pRc/CMV2 available from Invitrogen. Other suitable vectors will be readily apparent to the skilled artisan.

[0431] Any strong promoter known to those skilled in the art can be used for driving the expression of the polynucleotide sequence. Suitable promoters include adenoviral promoters, such as the adenoviral major late promoter; or heterologous promoters, such as the cytomegalovirus (CMV) promoter; the respiratory syncytial virus (RSV) promoter; inducible promoters, such as the MMT promoter, the metallothionein promoter; heat shock promoters; the albumin promoter; the ApoAI promoter; human globin promoters; viral thymidine kinase promoters, such as the Herpes Simplex thymidine kinase promoter; retroviral LTRs; the b-actin promoter; and human growth hormone promoters. The promoter also may be the native promoter for the polynucleotide of the present invention.

[0432] Unlike other gene therapy techniques, one major advantage of introducing naked nucleic acid sequences into target cells is the transitory nature of the polynucleotide synthesis in the cells. Studies have shown that non-replicating DNA sequences can be introduced into cells to provide production of the desired polypeptide for periods of up to six months.

[0433] The polynucleotide construct can be delivered to the interstitial space of tissues within the an animal, including of muscle, skin, brain, lung, liver, spleen, bone marrow, thymus, heart, lymph, blood, bone, cartilage, pancreas, kidney, gall bladder, stomach, intestine, testis, ovary, uterus, rectum, nervous system, eye, gland, and connective tissue. Interstitial space of the tissues comprises the intercellular, fluid, mucopolysaccharide matrix among the reticular fibers of organ tissues, elastic fibers in the walls of vessels or chambers, collagen fibers of fibrous tissues, or that same matrix within connective tissue ensheathing muscle cells or in the lacunae of bone. It is similarly the space occupied by the plasma of the circulation and the lymph fluid of the lymphatic channels. Delivery to the interstitial space of muscle tissue is preferred for the reasons discussed below. They may be conveniently delivered by injection into the tissues comprising these cells. They are preferably delivered to and expressed in persistent, non-dividing cells which are differentiated, although delivery and expression may be achieved in non-differentiated or less completely differentiated cells, such as, for example, stem cells of blood or skin fibroblasts. In vivo muscle cells are particularly competent in their ability to take up and express polynucleotides.

[0434] For the naked nucleic acid sequence injection, an effective dosage amount of DNA or RNA will be in the range of from about 0.05 mg/kg body weight to about 50 mg/kg body weight. Preferably the dosage will be from about 0.005 mg/kg to about 20 mg/kg and more preferably from about 0.05 mg/kg to about 5 mg/kg. Of course, as the artisan of ordinary skill will appreciate, this dosage will vary according to the tissue site of injection. The appropriate and effective dosage of nucleic acid sequence can readily be determined by those of ordinary skill in the art and may depend on the condition being treated and the route of administration.

[0435] The preferred route of administration is by the parenteral route of injection into the interstitial space of tissues. However, other parenteral routes may also be used, such as, inhalation of an aerosol formulation particularly for delivery to lungs or bronchial tissues, throat or mucous membranes of the nose. In addition, naked DNA constructs can be delivered to arteries during angioplasty by the catheter used in the procedure.

[0436] The naked polynucleotides are delivered by any method known in the art, including, but not limited to, direct needle injection at the delivery site, intravenous injection, topical administration, catheter infusion, and so-called “gene guns”. These delivery methods are known in the art.

[0437] The constructs may also be delivered with delivery vehicles such as viral sequences, viral particles, liposome formulations, lipofectin, precipitating agents, etc. Such methods of delivery are known in the art.

[0438] In certain embodiments, the polynucleotide constructs are complexed in a liposome preparation. Liposomal preparations for use in the instant invention include cationic (positively charged), anionic (negatively charged) and neutral preparations. However, cationic liposomes are particularly preferred because a tight charge complex can be formed between the cationic liposome and the polyanionic nucleic acid. Cationic liposomes have been shown to mediate intracellular delivery of plasmid DNA (Felgner et al., Proc. Natl. Acad. Sci. USA (1987) 84:7413-7416, which is herein incorporated by reference); mRNA (Malone et al., Proc. Natl. Acad. Sci. USA (1989) 86:6077-6081, which is herein incorporated by reference); and purified transcription factors (Debs et al., J. Biol. Chem. (1990) 265:10189-10192, which is herein incorporated by reference), in functional form.

[0439] Cationic liposomes are readily available. For example, N[1-2,3-dioleyloxy)propyl]-N,N,N-triethylammonium (DOTMA) liposomes are particularly useful and are available under the trademark Lipofectin, from GIBCO BRL, Grand Island, N.Y. (See, also, Felgner et al., Proc. Natl. Acad. Sci. USA (1987) 84:7413-7416, which is herein incorporated by reference). Other commercially available liposomes include transfectace (DDAB/DOPE) and DOTAP/DOPE (Boehringer).

[0440] Other cationic liposomes can be prepared from readily available materials using techniques well known in the art. See, e.g. PCT Publication No. WO 90/11092 (which is herein incorporated by reference) for a description of the synthesis of DOTAP (1,2-bis(oleoyloxy)-3-(trimethylammonio)propane) liposomes. Preparation of DOTMA liposomes is explained in the literature, see, e.g., P. Felgner et al., Proc. Natl. Acad. Sci. USA 84:7413-7417, which is herein incorporated by reference. Similar methods can be used to prepare liposomes from other cationic lipid materials.

[0441] Similarly, anionic and neutral liposomes are readily available, such as from Avanti Polar Lipids (Birmingham, Ala.), or can be easily prepared using readily available materials. Such materials include phosphatidyl, choline, cholesterol, phosphatidyl ethanolamine, dioleoylphosphatidyl choline (DOPC), dioleoylphosphatidyl glycerol (DOPG), dioleoylphoshatidyl ethanolamine (DOPE), among others. These materials can also be mixed with the DOTMA and DOTAP starting materials in appropriate ratios. Methods for making liposomes using these materials are well known in the art.

[0442] For example, commercially dioleoylphosphatidyl choline (DOPC), dioleoylphosphatidyl glycerol (DOPG), and dioleoylphosphatidyl ethanolamine (DOPE) can be used in various combinations to make conventional liposomes, with or without the addition of cholesterol. Thus, for example, DOPG/DOPC vesicles can be prepared by drying 50 mg each of DOPG and DOPC under a stream of nitrogen gas into a sonication vial. The sample is placed under a vacuum pump overnight and is hydrated the following day with deionized water. The sample is then sonicated for 2 hours in a capped vial, using a Heat Systems model 350 sonicator equipped with an inverted cup (bath type) probe at the maximum setting while the bath is circulated at 15EC. Alternatively, negatively charged vesicles can be prepared without sonication to produce multilamellar vesicles or by extrusion through nucleopore membranes to produce unilamellar vesicles of discrete size. Other methods are known and available to those of skill in the art.

[0443] The liposomes can comprise multilamellar vesicles (MLVs), small unilamellar vesicles (SUVs), or large unilamellar vesicles (LUVs), with SUVs being preferred. The various liposome-nucleic acid complexes are prepared using methods well known in the art. See, e.g., Straubinger et al., Methods of Immunology (1983), 101:512-527, which is herein incorporated by reference. For example, MLVs containing nucleic acid can be prepared by depositing a thin film of phospholipid on the walls of a glass tube and subsequently hydrating with a solution of the material to be encapsulated. SUVs are prepared by extended sonication of MLVs to produce a homogeneous population of unilamellar liposomes. The material to be entrapped is added to a suspension of preformed MLVs and then sonicated. When using liposomes containing cationic lipids, the dried lipid film is resuspended in an appropriate solution such as sterile water or an isotonic buffer solution such as 10 mM Tris/NaCl, sonicated, and then the preformed liposomes are mixed directly with the DNA. The liposome and DNA form a very stable complex due to binding of the positively charged liposomes to the cationic DNA. SUVs find use with small nucleic acid fragments. LUVs are prepared by a number of methods, well known in the art. Commonly used methods include Ca²⁺-EDTA chelation (Papahadjopoulos et al., Biochim. Biophys. Acta (1975) 394:483; Wilson et al., Cell 17:77 (1979)); ether injection (Deamer, D. and Bangham, A., Biochim. Biophys. Acta 443:629 (1976); Ostro et al., Biochem. Biophys. Res. Commun. 76:836 (1977); Fraley et al., Proc. Natl. Acad. Sci. USA 76:3348 (1979)); detergent dialysis (Enoch, H. and Strittmatter, P., Proc. Natl. Acad. Sci. USA 76:145 (1979)); and reverse-phase evaporation (REV) (Fraley et al., J. Biol. Chem. 255:10431 (1980); Szoka, F. and Papahadjopoulos, D., Proc. Natl. Acad. Sci. USA 75:145 (1978); Schaefer-Ridder et al., Science 215:166 (1982)), which are herein incorporated by reference.

[0444] Generally, the ratio of DNA to liposomes will be from about 10:1 to about 1:10. Preferably, the ration will be from about 5:1 to about 1:5. More preferably, the ration will be about 3:1 to about 1:3. Still more preferably, the ratio will be about 1:1.

[0445] U.S. Pat. No. 5,676,954 (which is herein incorporated by reference) reports on the injection of genetic material, complexed with cationic liposomes carriers, into mice. U.S. Pat. Nos. 4,897,355, 4,946,787, 5,049,386, 5,459,127, 5,589,466, 5,693,622, 5,580,859, 5,703,055, and international publication no. WO 94/9469 (which are herein incorporated by reference) provide cationic lipids for use in transfecting DNA into cells and mammals. U.S. Pat. Nos. 5,589,466, 5,693,622, 5,580,859, 5,703,055, and international publication no. WO 94/9469 provide methods for delivering DNA-cationic lipid complexes to mammals.

[0446] In certain embodiments, cells are engineered, ex vivo or in vivo, using a retroviral particle containing RNA which comprises a sequence encoding a polypeptide of the present invention. Retroviruses from which the retroviral plasmid vectors may be derived include, but are not limited to, Moloney Murine Leukemia Virus, spleen necrosis virus, Rous sarcoma Virus, Harvey Sarcoma Virus, avian leukosis virus, gibbon ape leukemia virus, human immunodeficiency virus, Myeloproliferative Sarcoma Virus, and mammary tumor virus.

[0447] The retroviral plasmid vector is employed to transduce packaging cell lines to form producer cell lines. Examples of packaging cells which may be transfected include, but are not limited to, the PE501, PA317, R-2, R-AM, PA12, T19-14×, VT-19-17-H2, RCRE, RCRIP, GP+E-86, GP+envAm12, and DAN cell lines as described in Miller, Human Gene Therapy 1:5-14 (1990), which is incorporated herein by reference in its entirety. The vector may transduce the packaging cells through any means known in the art. Such means include, but are not limited to, electroporation, the use of liposomes, and CaPO₄ precipitation. In one alternative, the retroviral plasmid vector may be encapsulated into a liposome, or coupled to a lipid, and then administered to a host.

[0448] The producer cell line generates infectious retroviral vector particles which include polynucleotide encoding a polypeptide of the present invention. Such retroviral vector particles then may be employed, to transduce eukaryotic cells, either in vitro or in vivo. The transduced eukaryotic cells will express a polypeptide of the present invention.

[0449] In certain other embodiments, cells are engineered, ex vivo or in vivo, with polynucleotide contained in an adenovirus vector. Adenovirus can be manipulated such that it encodes and expresses a polypeptide of the present invention, and at the same time is inactivated in terms of its ability to replicate in a normal lytic viral life cycle. Adenovirus expression is achieved without integration of the viral DNA into the host cell chromosome, thereby alleviating concerns about insertional mutagenesis. Furthermore, adenoviruses have been used as live enteric vaccines for many years with an excellent safety profile (Schwartz et al. Am. Rev. Respir. Dis.109:233-238 (1974)). Finally, adenovirus mediated gene transfer has been demonstrated in a number of instances including transfer of alpha-1-antitrypsin and CFTR to the lungs of cotton rats (Rosenfeld, M. A. et al. (1991) Science 252:431-434; Rosenfeld et al., (1992) Cell 68:143-155). Furthermore, extensive studies to attempt to establish adenovirus as a causative agent in human cancer were uniformly negative (Green, M. et al. (1979) Proc. Natl. Acad. Sci. USA 76:6606).

[0450] Suitable adenoviral vectors useful in the present invention are described, for example, in Kozarsky and Wilson, Curr. Opin. Genet. Devel. 3:499-503 (1993); Rosenfeld et al., Cell 68:143-155 (1992); Engelhardt et al., Human Genet. Ther. 4:759-769 (1993); Yang et al., Nature Genet. 7:362-369 (1994); Wilson et al., Nature 365:691-692 (1993); and U.S. Pat. No. 5,652,224, which are herein incorporated by reference. For example, the adenovirus vector Ad2 is useful and can be grown in human 293 cells. These cells contain the E1 region of adenovirus and constitutively express E1a and E1b, which complement the defective adenoviruses by providing the products of the genes deleted from the vector. In addition to Ad2, other varieties of adenovirus (e.g., Ad3, Ad5, and Ad7) are also useful in the present invention.

[0451] Preferably, the adenoviruses used in the present invention are replication deficient. Replication deficient adenoviruses require the aid of a helper virus and/or packaging cell line to form infectious particles. The resulting virus is capable of infecting cells and can express a polynucleotide of interest which is operably linked to a promoter, but cannot replicate in most cells. Replication deficient adenoviruses may be deleted in one or more of all or a portion of the following genes: E1a, E1b, E3, E4, E2a, or L1 through L5.

[0452] In certain other embodiments, the cells are engineered, ex vivo or in vivo, using an adeno-associated virus (AAV). AAVs are naturally occurring defective viruses that require helper viruses to produce infectious particles (Muzyczka, N., Curr. Topics in Microbiol. immunol. 158:97 (1992)). It is also one of the few viruses that may integrate its DNA into non-dividing cells. Vectors containing as little as 300 base pairs of AAV can be packaged and can integrate, but space for exogenous DNA is limited to about 4.5 kb. Methods for producing and using such AAVs are known in the art. See, for example, U.S. Pat. Nos. 5,139,941, 5,173,414, 5,354,678, 5,436,146, 5,474,935, 5,478,745, and 5,589,377.

[0453] For example, an appropriate AAV vector for use in the present invention will include all the sequences necessary for DNA replication, encapsidation, and host-cell integration. The polynucleotide construct is inserted into the AAV vector using standard cloning methods, such as those found in Sambrook et al., Molecular Cloning: A Laboratory Manual, Cold Spring Harbor Press (1989). The recombinant AAV vector is then transfected into packaging cells which are infected with a helper virus, using any standard technique, including lipofection, electroporation, calcium phosphate precipitation, etc. Appropriate helper viruses include adenoviruses, cytomegaloviruses, vaccinia viruses, or herpes viruses. Once the packaging cells are transfected and infected, they will produce infectious AAV viral particles which contain the polynucleotide construct. These viral particles are then used to transduce eukaryotic cells, either ex vivo or in vivo. The transduced cells will contain the polynucleotide construct integrated into its genome, and will express a polypeptide of the invention.

[0454] Another method of gene therapy involves operably associating heterologous control regions and endogenous polynucleotide sequences (e.g. encoding a polypeptide of the present invention) via homologous recombination (see, e.g., U.S. Pat. No. 5,641,670, issued Jun. 24, 1997; International Publication No. WO 96/29411, published Sep. 26, 1996; International Publication No. WO 94/12650, published Aug. 4, 1994; Koller et al., Proc. Natl. Acad. Sci. USA 86:8932-8935 (1989); and Zijlstra et al., Nature 342:435-438 (1989), which are herein encorporated by reference. This method involves the activation of a gene which is present in the target cells, but which is not normally expressed in the cells, or is expressed at a lower level than desired.

[0455] Polynucleotide constructs are made, using standard techniques known in the art, which contain the promoter with targeting sequences flanking the promoter. Suitable promoters are described herein. The targeting sequence is sufficiently complementary to an endogenous sequence to permit homologous recombination of the promoter-targeting sequence with the endogenous sequence. The targeting sequence will be sufficiently near the 5′ end of the desired endogenous polynucleotide sequence so the promoter will be operably linked to the endogenous sequence upon homologous recombination.

[0456] The promoter and the targeting sequences can be amplified using PCR. Preferably, the amplified promoter contains distinct restriction enzyme sites on the 5′ and 3′ ends. Preferably, the 3′ end of the first targeting sequence contains the same restriction enzyme site as the 5′ end of the amplified promoter and the 5′ end of the second targeting sequence contains the same restriction site as the 3′ end of the amplified promoter. The amplified promoter and targeting sequences are digested and ligated together.

[0457] The promoter-targeting sequence construct is delivered to the cells, either as naked polynucleotide, or in conjunction with transfection-facilitating agents, such as liposomes, viral sequences, viral particles, whole viruses, lipofection, precipitating agents, etc., described in more detail above. The P promoter-targeting sequence can be delivered by any method, included direct needle injection, intravenous injection, topical administration, catheter infusion, particle accelerators, etc. The methods are described in more detail below.

[0458] The promoter-targeting sequence construct is taken up by cells. Homologous recombination between the construct and the endogenous sequence takes place, such that an endogenous sequence is placed under the control of the promoter. The promoter then drives the expression of the endogenous sequence.

[0459] The polynucleotide encoding a polypeptide of the present invention may contain a secretory signal sequence that facilitates secretion of the protein. Typically, the signal sequence is positioned in the coding region of the polynucleotide to be expressed towards or at the 5′ end of the coding region. The signal sequence may be homologous or heterologous to the polynucleotide of interest and may be homologous or heterologous to the cells to be transfected. Additionally, the signal sequence may be chemically synthesized using methods known in the art.

[0460] Any mode of administration of any of the above-described polynucleotides constructs can be used so long as the mode results in the expression of one or more molecules in an amount sufficient to provide a therapeutic effect. This includes direct needle injection, systemic injection, catheter infusion, biolistic injectors, particle accelerators (i.e., “gene guns”), gelfoam sponge depots, other commercially available depot materials, osmotic pumps (e.g., Alza minipumps), oral or suppositorial solid (tablet or pill) pharmaceutical formulations, and decanting or topical applications during surgery. For example, direct injection of naked calcium phosphate-precipitated plasmid into rat liver and rat spleen or a protein-coated plasmid into the portal vein has resulted in gene expression of the foreign gene in the rat livers (Kaneda et al., Science 243:375 (1989)).

[0461] A preferred method of local administration is by direct injection. Preferably, a recombinant molecule of the present invention complexed with a delivery vehicle is administered by direct injection into or locally within the area of arteries. Administration of a composition locally within the area of arteries refers to injecting the composition centimeters and preferably, millimeters within arteries.

[0462] Another method of local administration is to contact a polynucleotide construct of the present invention in or around a surgical wound. For example, a patient can undergo surgery and the polynucleotide construct can be coated on the surface of tissue inside the wound or the construct can be injected into areas of tissue inside the wound.

[0463] Therapeutic compositions useful in systemic administration, include recombinant molecules of the present invention complexed to a targeted delivery vehicle of the present invention. Suitable delivery vehicles for use with systemic administration comprise liposomes comprising ligands for targeting the vehicle to a particular site. In specific embodiments, suitable delivery vehicles for use with systemic administration comprise liposomes comprising polypeptides of the invention for targeting the vehicle to a particular site.

[0464] Preferred methods of systemic administration, include intravenous injection, aerosol, oral and percutaneous (topical) delivery. Intravenous injections can be performed using methods standard in the art. Aerosol delivery can also be performed using methods standard in the art (see, for example, Stribling et al., Proc. Natl. Acad. Sci. USA 189:11277-11281, 1992, which is incorporated herein by reference). Oral delivery can be performed by complexing a polynucleotide construct of the present invention to a carrier capable of withstanding degradation by digestive enzymes in the gut of an animal. Examples of such carriers, include plastic capsules or tablets, such as those known in the art. Topical delivery can be performed by mixing a polynucleotide construct of the present invention with a lipophilic reagent (e.g., DMSO) that is capable of passing into the skin.

[0465] Determining an effective amount of substance to be delivered can depend upon a number of factors including, for example, the chemical structure and biological activity of the substance, the age and weight of the animal, the precise condition requiring treatment and its severity, and the route of administration. The frequency of treatments depends upon a number of factors, such as the amount of polynucleotide constructs administered per dose, as well as the health and history of the subject. The precise amount, number of doses, and timing of doses will be determined by the attending physician or veterinarian.

[0466] Therapeutic compositions of the present invention can be administered to any animal, preferably to mammals and birds. Preferred mammals include humans, dogs, cats, mice, rats, rabbits sheep, cattle, horses and pigs, with humans being particularly preferred.

[0467] Biological Activities

[0468] Polynucleotides or polypeptides, or agonists or antagonists of the present invention, can be used in assays to test for one or more biological activities. If these polynucleotides or polypeptides, or agonists or antagonists of the present invention, do exhibit activity in a particular assay, it is likely that these molecules may be involved in the diseases associated with the biological activity. Thus, the polynucleotides and polypeptides, and agonists or antagonists could be used to treat the associated disease.

[0469] Nervous system-associated proteins are believed to be involved in biological activities associated with nervous system functions. Accordingly, compositions of the invention (including polynucleotides, polypeptides and antibodies of the invention, and fragments and variants thereof) may be used in the diagnosis, prognosis, prevention, and/or treatment of diseases and/or disorders associated with inappropriate nervous system activity.

[0470] In preferred embodiments, compositions of the invention (including polynucleotides, polypeptides and antibodies of the invention, and fragments and variants thereof) may be used in the diagnosis, prognosis, prevention, and/or treatment of diseases and/or disorders relating to the nervous system, including, for example, cerebrovascular disorders (e.g., stroke, cerebral aneurysm, and/or as described below under “Cardiovascular Disorders” and “Neural Activity and Neurological Diseases”), metabolic brain diseases (e.g., Hartnup disease, hepatic encephalopathy, phenylketonuria, pyruvate carboxylase deficiency, and/or as described below in the section entitled “Neural Activity and Neurological Diseases”), neuromuscular disorders (e.g., amyotrophic lateral sclerosis, muscular dystrophy, myotonia atrophica, familial periodic paralysis, and/or as described below in the section entitled “Neural Activity and Neurological Diseases”), nervous system infections (e.g., AIDS dementia complex, encephalitis, meningitis, cerebral malaria, and/or as described below in the section entitled “Neural Activity and Neurological Diseases”), demyelinating diseases (e.g., multiple sclerosis, Canavan disease, metachromatic eukodystrophy, and/or as described below in the section entitled “Neural Activity and Neurological Diseases”), nervous system neoplasms (e.g., cerebellar neoplasms, infratenorial neoplasms, supratentorial neoplasms, and/or as described below in the section entitled “Neural Activity and Neurological Diseases”), spinal cord diseases (e.g., spinal muscular atrophy, Werdnig-Hoffmann disease, myelitis, and/or as described below in the section entitled “Neural Activity and Neurological Diseases”), developmental nervous system abnormalities (e.g., spinal dysraphism, neural tube defects, holoprosencephaly, and/or as described below in the section entitled “Neural Activity and Neurological Diseases”), neurologic manifestations (agnosia, dyslexia, hallucinations, ataxia, and/or as described below in the section entitled “Neural Activity and Neurological Diseases”), diseases of the peripheral nervous system (e.g., cranial nerve diseases, facial nerve disease, optic nerve diseases, and/or as described below in the section entitled “Neural Activity and Neurological Diseases”), inflammatory disorders of the nervous system (e.g., encephalitis, meningitis, and/or those described under “Immune Activity” and “Neural Activity and Neurological Diseases” below), and others described below in the section entitled “Neural Activity and Neurological Diseases”.

[0471] In another preferred embodiment, compositions of the invention (including polynucleotides, polypeptides and antibodies of the invention, and fragments and variants thereof) may be used in the diagnosis, prognosis, prevention, and/or treatment of traumatic injury to the nervous system (e.g., traumatic head injury, spinal cord injury, peripheral nerve damage, and/or as described in the section entitled “Neural Activity and Neurological Diseases”).

[0472] In another embodiment, a polypeptide of the invention, or polynucleotides, antibodies, agonists, or antagonists corresponding to that polypeptide, may be used to diagnose, prognose, prevent, and/or treat neurological disorders or injuries associated with the tissue(s) in which the polypeptide of the invention is expressed, including one, two, three, four, five, or more tissues disclosed in Table 1A, column 8 (Tissue Distribution Library Code).

[0473] Thus, polynucleotides, translation products and antibodies of the invention are useful in the diagnosis, detection and/or treatment of diseases and/or disorders associated with activities that include, but are not limited to, neuromuscular disorders, infections of the nervous system, demyelinating diseases, cerebrovascular disorders, nervous system neoplasms, spinal cord diseases, inflammatory disorders of the nervous system, traumatic injury, nervous system abnormalities, neurologic manifestations, diseases of the peripheral nervous system, and metabolic brain diseases.

[0474] More generally, polynucleotides, translation products and antibodies corresponding to this gene may be useful for the diagnosis, detection and/or treatment of diseases and/or disorders associated with the following systems.

[0475] Neural Activity and Neurological Diseases

[0476] The polynucleotides, polypeptides and agonists or antagonists of the invention may be used for the diagnosis and/or treatment of diseases, disorders, damage or injury of the brain and/or nervous system. Nervous system disorders that can be treated with the compositions of the invention (e.g., polypeptides, polynucleotides, and/or agonists or antagonists), include, but are not limited to, nervous system injuries, and diseases or disorders which result in either a disconnection of axons, a diminution or degeneration of neurons, or demyelination. Nervous system lesions which may be treated in a patient (including human and non-human mammalian patients) according to the methods of the invention, include but are not limited to, the following lesions of either the central (including spinal cord, brain) or peripheral nervous systems: (1) ischemic lesions, in which a lack of oxygen in a portion of the nervous system results in neuronal injury or death, including cerebral infarction or ischemia, or spinal cord infarction or ischemia; (2) traumatic lesions, including lesions caused by physical injury or associated with surgery, for example, lesions which sever a portion of the nervous system, or compression injuries; (3) malignant lesions, in which a portion of the nervous system is destroyed or injured by malignant tissue which is either a nervous system associated malignancy or a malignancy derived from non-nervous system tissue; (4) infectious lesions, in which a portion of the nervous system is destroyed or injured as a result of infection, for example, by an abscess or associated with infection by human immunodeficiency virus, herpes zoster, or herpes simplex virus or with Lyme disease, tuberculosis, or syphilis; (5) degenerative lesions, in which a portion of the nervous system is destroyed or injured as a result of a degenerative process including but not limited to, degeneration associated with Parkinson's disease, Alzheimer's disease, Huntington's chorea, or amyotrophic lateral sclerosis (ALS); (6) lesions associated with nutritional diseases or disorders, in which a portion of the nervous system is destroyed or injured by a nutritional disorder or disorder of metabolism including, but not limited to, vitamin B12 deficiency, folic acid deficiency, Wernicke disease, tobacco-alcohol amblyopia, Marchiafava-Bignami disease (primary degeneration of the corpus callosum), and alcoholic cerebellar degeneration; (7) neurological lesions associated with systemic diseases including, but not limited to, diabetes (diabetic neuropathy, Bell's palsy), systemic lupus erythematosus, carcinoma, or sarcoidosis; (8) lesions caused by toxic substances including alcohol, lead, or particular neurotoxins; and (9) demyelinated lesions in which a portion of the nervous system is destroyed or injured by a demyelinating disease including, but not limited to, multiple sclerosis, human immunodeficiency virus-associated myelopathy, transverse myclopathy or various etiologies, progressive multifocal leukoencephalopathy, and central pontine myelinolysis.

[0477] In one embodiment, the polypeptides, polynucleotides, or agonists or antagonists of the invention are used to protect neural cells from the damaging effects of hypoxia. In a further preferred embodiment, the polypeptides, polynucleotides, or agonists or antagonists of the invention are used to protect neural cells from the damaging effects of cerebral hypoxia. According to this embodiment, the compositions of the invention are used to treat or prevent neural cell injury associated with cerebral hypoxia. In one non-exclusive aspect of this embodiment, the polypeptides, polynucleotides, or agonists or antagonists of the invention, are used to treat or prevent neural cell injury associated with cerebral ischemia. In another non-exclusive aspect of this embodiment, the polypeptides, polynucleotides, or agonists or antagonists of the invention are used to treat or prevent neural cell injury associated with cerebral infarction.

[0478] In another preferred embodiment, the polypeptides, polynucleotides, or agonists or antagonists of the invention are used to treat or prevent neural cell injury associated with a stroke. In a specific embodiment, the polypeptides, polynucleotides, or agonists or antagonists of the invention are used to treat or prevent cerebral neural cell injury associated with a stroke.

[0479] In another preferred embodiment, the polypeptides, polynucleotides, or agonists or antagonists of the invention are used to treat or prevent neural cell injury associated with a heart attack. In a specific embodiment, the polypeptides, polynucleotides, or agonists or antagonists of the invention are used to treat or prevent cerebral neural cell injury associated with a heart attack.

[0480] The compositions of the invention which are useful for treating or preventing a nervous system disorder may be selected by testing for biological activity in promoting the survival or differentiation of neurons. For example, and not by way of limitation, compositions of the invention which elicit any of the following effects may be useful according to the invention: (1) increased survival time of neurons in culture either in the presence or absence of hypoxia or hypoxic conditions; (2) increased sprouting of neurons in culture or in vivo; (3) increased production of a neuron-associated molecule in culture or in vivo, e.g., choline acetyltransferase or acetylcholinesterase with respect to motor neurons; or (4) decreased symptoms of neuron dysfunction in vivo. Such effects may be measured by any method known in the art. In preferred, non-limiting embodiments, increased survival of neurons may routinely be measured using a method set forth herein or otherwise known in the art, such as, for example, in Zhang et al., Proc Natl Acad Sci USA 97:3637-42 (2000) or in Arakawa et al., J. Neurosci., 10:3507-15 (1990); increased sprouting of neurons may be detected by methods known in the art, such as, for example, the methods set forth in Pestronk et al., Exp. Neurol., 70:65-82 (1980), or Brown et al, Ann. Rev. Neurosci., 4:17-42 (1981); increased production of neuron-associated molecules may be measured by bioassay, enzymatic assay, antibody binding, Northern blot assay, etc., using techniques known in the art and depending on the molecule to be measured; and motor neuron dysfunction may be measured by assessing the physical manifestation of motor neuron disorder, e.g., weakness, motor neuron conduction velocity, or functional disability.

[0481] In specific embodiments, motor neuron disorders that may be treated according to the invention include, but are not limited to, disorders such as infarction, infection, exposure to toxin, trauma, surgical damage, degenerative disease or malignancy that may affect motor neurons as well as other components of the nervous system, as well as disorders that selectively affect neurons such as amyotrophic lateral sclerosis, and including, but not limited to, progressive spinal muscular atrophy, progressive bulbar palsy, primary lateral sclerosis, infantile and juvenile muscular atrophy, progressive bulbar paralysis of childhood (Fazio-Londe syndrome), poliomyelitis and the post polio syndrome, and Hereditary Motorsensory Neuropathy (Charcot-Marie-Tooth Disease).

[0482] Further, polypeptides or polynucleotides of the invention may play a role in neuronal survival; synapse formation; conductance; neural differentiation, etc. Thus, compositions of the invention (including polynucleotides, polypeptides, and agonists or antagonists) may be used to diagnose and/or treat or prevent diseases or disorders associated with these roles, including, but not limited to, learning and/or cognition disorders. The compositions of the invention may also be useful in the treatment or prevention of neurodegenerative disease states and/or behavioural disorders. Such neurodegenerative disease states and/or behavioral disorders include, but are not limited to, Alzheimer's Disease, Parkinson's Disease, Huntington's Disease, Tourette Syndrome, schizophrenia, mania, dementia, paranoia, obsessive compulsive disorder, panic disorder, learning disabilities, ALS, psychoses, autism, and altered behaviors, including disorders in feeding, sleep patterns, balance, and perception. In addition, compositions of the invention may also play a role in the treatment, prevention and/or detection of developmental disorders associated with the developing embryo, or sexually-linked disorders.

[0483] Additionally, polypeptides, polynucleotides and/or agonists or antagonists of the invention, may be useful in protecting neural cells from diseases, damage, disorders, or injury, associated with cerebrovascular disorders including, but not limited to, carotid artery diseases (e.g., carotid artery thrombosis, carotid stenosis, or Moyamoya Disease), cerebral amyloid angiopathy, cerebral aneurysm, cerebral anoxia, cerebral arteriosclerosis, cerebral arterioyenous malformations, cerebral artery diseases, cerebral embolism and thrombosis (e.g., carotid artery thrombosis, sinus thrombosis, or Wallenberg's Syndrome), cerebral hemorrhage (e.g., epidural or subdural hematoma, or subarachnoid hemorrhage), cerebral infarction, cerebral ischemia (e.g., transient cerebral ischemia, Subclavian Steal Syndrome, or vertebrobasilar insufficiency), vascular dementia (e.g., multi-infarct), leukomalacia, periventricular, and vascular headache (e.g., cluster headache or migraines).

[0484] In accordance with yet a further aspect of the present invention, there is provided a process for utilizing polynucleotides or polypeptides, as well as agonists or antagonists of the present invention, for therapeutic purposes, for example, to stimulate neurological cell proliferation and/or differentiation. Therefore, polynucleotides, polypeptides, agonists and/or antagonists of the invention may be used to treat and/or detect neurologic diseases. Moreover, polynucleotides or polypeptides, or agonists or antagonists of the invention, can be used as a marker or detector of a particular nervous system disease or disorder.

[0485] Examples of neurologic diseases which can be treated or detected with polynucleotides, polypeptides, agonists, and/or antagonists of the present invention include brain diseases, such as metabolic brain diseases which includes phenylketonuria such as maternal phenylketonuria, pyruvate carboxylase deficiency, pyruvate dehydrogenase complex deficiency, Wernicke's Encephalopathy, brain edema, brain neoplasms such as cerebellar neoplasms which include infratentorial neoplasms, cerebral ventricle neoplasms such as choroid plexus neoplasms, hypothalamic neoplasms, supratentorial neoplasms, canavan disease, cerebellar diseases such as cerebellar ataxia which include spinocerebellar degeneration such as ataxia telangiectasia, cerebellar dyssynergia, Friederich's Ataxia, Machado-Joseph Disease, olivopontocerebellar atrophy, cerebellar neoplasms such as infratentorial neoplasms, diffuse cerebral sclerosis such as encephalitis periaxialis, globoid cell leukodystrophy, metachromatic leukodystrophy and subacute sclerosing panencephalitis.

[0486] Additional neurologic diseases which can be treated or detected with polynucleotides, polypeptides, agonists, and/or antagonists of the present invention include cerebrovascular disorders (such as carotid artery diseases which include carotid artery thrombosis, carotid stenosis and Moyamoya Disease), cerebral amyloid angiopathy, cerebral aneurysm, cerebral anoxia, cerebral arteriosclerosis, cerebral arterioyenous malformations, cerebral artery diseases, cerebral embolism and thrombosis such as carotid artery thrombosis, sinus thrombosis and Wallenberg's Syndrome, cerebral hemorrhage such as epidural hematoma, subdural hematoma and subarachnoid hemorrhage, cerebral infarction, cerebral ischemia such as transient cerebral ischemia, Subclavian Steal Syndrome and vertebrobasilar insufficiency, vascular dementia such as multi-infarct dementia, periventricular leukomalacia, vascular headache such as cluster headache and migraine.

[0487] Additional neurologic diseases which can be treated or detected with polynucleotides, polypeptides, agonists, and/or antagonists of the present invention include dementia such as AIDS Dementia Complex, presenile dementia such as Alzheimer's Disease and Creutzfeldt-Jakob Syndrome, senile dementia such as Alzheimer's Disease and progressive supranuclear palsy, vascular dementia such as multi-infarct dementia, encephalitis which include encephalitis periaxialis, viral encephalitis such as epidemic encephalitis, Japanese Encephalitis, St. Louis Encephalitis, tick-borne encephalitis and West Nile Fever, acute disseminated encephalomyelitis, meningoencephalitis such as uveomeningoencephalitic syndrome, Postencephalitic Parkinson Disease and subacute sclerosing panencephalitis, encephalomalacia such as periventricular leukomalacia, epilepsy such as generalized epilepsy which includes infantile spasms, absence epilepsy, myoclonic epilepsy which includes MERRF Syndrome, tonic-clonic epilepsy, partial epilepsy such as complex partial epilepsy, frontal lobe epilepsy and temporal lobe epilepsy, post-traumatic epilepsy, status epilepticus such as Epilepsia Partialis Continua, and Hallervorden-Spatz Syndrome.

[0488] Additional neurologic diseases which can be treated or detected with polynucleotides, polypeptides, agonists, and/or antagonists of the present invention include hydrocephalus such as Dandy-Walker Syndrome and normal pressure hydrocephalus, hypothalamic diseases such as hypothalamic neoplasms, cerebral malaria, narcolepsy which includes cataplexy, bulbar poliomyelitis, cerebri pseudotumor, Rett Syndrome, Reye's Syndrome, thalamic diseases, cerebral toxoplasmosis, intracranial tuberculoma and Zellweger Syndrome, central nervous system infections such as AIDS Dementia Complex, Brain Abscess, subdural empyema, encephalomyelitis such as Equine Encephalomyelitis, Venezuelan Equine Encephalomyelitis, Necrotizing Hemorrhagic Encephalomyelitis, Visna, and cerebral malaria.

[0489] Additional neurologic diseases which can be treated or detected with polynucleotides, polypeptides, agonists, and/or antagonists of the present invention include meningitis such as arachnoiditis, aseptic meningtitis such as viral meningtitis which includes lymphocytic choriomeningitis, Bacterial meningtitis which includes Haemophilus Meningtitis, Listeria Meningtitis, Meningococcal Meningtitis such as Waterhouse-Friderichsen Syndrome, Pneumococcal Meningtitis and meningeal tuberculosis, fungal meningitis such as Cryptococcal Meningtitis, subdural effusion, meningoencephalitis such as uvemeningoencephalitic syndrome, myelitis such as transverse myelitis, neurosyphilis such as tabes dorsalis, poliomyelitis which includes bulbar poliomyelitis and postpoliomyelitis syndrome, prion diseases (such as Creutzfeldt-Jakob Syndrome, Bovine Spongiform Encephalopathy, Gerstmann-Straussler Syndrome, Kuru, Scrapie), and cerebral toxoplasmosis.

[0490] Additional neurologic diseases which can be treated or detected with polynucleotides, polypeptides, agonists, and/or antagonists of the present invention include central nervous system neoplasms such as brain neoplasms that include cerebellar neoplasms such as infratentorial neoplasms, cerebral ventricle neoplasms such as choroid plexus neoplasms, hypothalamic neoplasms and supratentorial neoplasms, meningeal neoplasms, spinal cord neoplasms which include epidural neoplasms, demyelinating diseases such as Canavan Diseases, diffuse cerebral sceloris which includes adrenoleukodystrophy, encephalitis periaxialis, globoid cell leukodystrophy, diffuse cerebral sclerosis such as metachromatic leukodystrophy, allergic encephalomyelitis, necrotizing hemorrhagic encephalomyelitis, progressive multifocal leukoencephalopathy, multiple sclerosis, central pontine myelinolysis, transverse myelitis, neuromyelitis optica, Scrapie, Swayback, Chronic Fatigue Syndrome, Visna, High Pressure Nervous Syndrome, Meningism, spinal cord diseases such as amyotonia congenita, amyotrophic lateral sclerosis, spinal muscular atrophy such as Werdnig-Hoffmann Disease, spinal cord compression, spinal cord neoplasms such as epidural neoplasms, syringomyelia, Tabes Dorsalis, Stiff-Man Syndrome, mental retardation such as Angelman Syndrome, Cri-du-Chat Syndrome, De Lange's Syndrome, Down Syndrome, Gangliosidoses such as gangliosidoses G(M1), Sandhoff Disease, Tay-Sachs Disease, Hartnup Disease, homocystinuria, Laurence-Moon-Biedl Syndrome, Lesch-Nyhan Syndrome, Maple Syrup Urine Disease, mucolipidosis such as fucosidosis, neuronal ceroid-lipofuscinosis, oculocerebrorenal syndrome, phenylketonuria such as maternal phenylketonuria, Prader-Willi Syndrome, Rett Syndrome, Rubinstein-Taybi Syndrome, Tuberous Sclerosis, WAGR Syndrome, nervous system abnormalities such as holoprosencephaly, neural tube defects such as anencephaly which includes hydrangencephaly, Arnold-Chairi Deformity, encephalocele, meningocele, meningomyelocele, spinal dysraphism such as spina bifida cystica and spina bifida occulta.

[0491] Additional neurologic diseases which can be treated or detected with polynucleotides, polypeptides, agonists, and/or antagonists of the present invention include hereditary motor and sensory neuropathies which include Charcot-Marie Disease, Hereditary optic atrophy, Refsum's Disease, hereditary spastic paraplegia, Werdnig-Hoffmann Disease, Hereditary Sensory and Autonomic Neuropathies such as Congenital Analgesia and Familial Dysautonomia, Neurologic manifestations (such as agnosia that include Gerstmann's Syndrome, Amnesia such as retrograde amnesia, apraxia, neurogenic bladder, cataplexy, communicative disorders such as hearing disorders that includes deafness, partial hearing loss, loudness recruitment and tinnitus, language disorders such as aphasia which include agraphia, anomia, broca aphasia, and Wernicke Aphasia, Dyslexia such as Acquired Dyslexia, language development disorders, speech disorders such as aphasia which includes anomia, broca aphasia and Wernicke Aphasia, articulation disorders, communicative disorders such as speech disorders which include dysarthria, echolalia, mutism and stuttering, voice disorders such as aphonia and hoarseness, decerebrate state, delirium, fasciculation, hallucinations, meningism, movement disorders such as angelman syndrome, ataxia, athetosis, chorea, dystonia, hypokinesia, muscle hypotonia, myoclonus, tic, torticollis and tremor, muscle hypertonia such as muscle rigidity such as stiff-man syndrome, muscle spasticity, paralysis such as facial paralysis which includes Herpes Zoster Oticus, Gastroparesis, Hemiplegia, ophthalmoplegia such as diplopia, Duane's Syndrome, Horner's Syndrome, Chronic progressive external ophthalmoplegia such as Kearns Syndrome, Bulbar Paralysis, Tropical Spastic Paraparesis, Paraplegia such as Brown-Sequard Syndrome, quadriplegia, respiratory paralysis and vocal cord paralysis, paresis, phantom limb, taste disorders such as ageusia and dysgeusia, vision disorders such as amblyopia, blindness, color vision defects, diplopia, hemianopsia, scotoma and subnormal vision, sleep disorders such as hypersomnia which includes Kleine-Levin Syndrome, insomnia, and somnambulism, spasm such as trismus, unconsciousness such as coma, persistent vegetative state and syncope and vertigo, neuromuscular diseases such as amyotonia congenita, amyotrophic lateral sclerosis, Lambert-Eaton Myasthenic Syndrome, motor neuron disease, muscular atrophy such as spinal muscular atrophy, Charcot-Marie Disease and Werdnig-Hoffmann Disease, Postpoliomyelitis Syndrome, Muscular Dystrophy, Myasthenia Gravis, Myotonia Atrophica, Myotonia Confenita, Nemaline Myopathy, Familial Periodic Paralysis, Multiplex Paramyloclonus, Tropical Spastic Paraparesis and Stiff-Man Syndrome, peripheral nervous system diseases such as acrodynia, amyloid neuropathies, autonomic nervous system diseases such as Adie's Syndrome, Barre-Lieou Syndrome, Familial Dysautonomia, Homer's Syndrome, Reflex Sympathetic Dystrophy and Shy-Drager Syndrome, Cranial Nerve Diseases such as Acoustic Nerve Diseases such as Acoustic Neuroma which includes Neurofibromatosis 2, Facial Nerve Diseases such as Facial Neuralgia, Melkersson-Rosenthal Syndrome, ocular motility disorders which includes amblyopia, nystagmus, oculomotor nerve paralysis, ophthalmoplegia such as Duane's Syndrome, Homer's Syndrome, Chronic Progressive External Ophthalmoplegia which includes Kearns Syndrome, Strabismus such as Esotropia and Exotropia, Oculomotor Nerve Paralysis, Optic Nerve Diseases such as Optic Atrophy which includes Hereditary Optic Atrophy, Optic Disk Drusen, Optic Neuritis such as Neuromyclitis Optica, Papilledema, Trigeminal Neuralgia, Vocal Cord Paralysis, Demyelinating Diseases such as Neuromyelitis Optica and Swayback, and Diabetic neuropathies such as diabetic foot.

[0492] Additional neurologic diseases which can be treated or detected with polynucleotides, polypeptides, agonists, and/or antagonists of the present invention include nerve compression syndromes such as carpal tunnel syndrome, tarsal tunnel syndrome, thoracic outlet syndrome such as cervical rib syndrome, ulnar nerve compression syndrome, neuralgia such as causalgia, cervico-brachial neuralgia, facial neuralgia and trigeminal neuralgia, neuritis such as experimental allergic neuritis, optic neuritis, polyneuritis, polyradiculoneuritis and radiculities such as polyradiculitis, hereditary motor and sensory neuropathies such as Charcot-Marie Disease, Hereditary Optic Atrophy, Refsum's Disease, Hereditary Spastic Paraplegia and Werdnig-Hoffmann Disease, Hereditary Sensory and Autonomic Neuropathies which include Congenital Analgesia and Familial Dysautonomia, POEMS Syndrome, Sciatica, Gustatory Sweating and Tetany).

[0493] Immune Activity

[0494] Polynucleotides, polypeptides, antibodies, and/or agonists or antagonists of the present invention may be useful in treating, preventing, diagnosing and/or prognosing diseases, disorders, and/or conditions of the immune system, by, for example, activating or inhibiting the proliferation, differentiation, or mobilization (chemotaxis) of immune cells. Immune cells develop through a process called hematopoiesis, producing myeloid (platelets, red blood cells, neutrophils, and macrophages) and lymphoid (B and T lymphocytes) cells from pluripotent stem cells. The etiology of these immune diseases, disorders, and/or conditions may be genetic, somatic, such as cancer and some autoimmune diseases, acquired (e.g., by chemotherapy or toxins), or infectious. Moreover, polynucleotides, polypeptides, antibodies, and/or agonists or antagonists of the present invention can be used as a marker or detector of a particular immune system disease or disorder.

[0495] In another embodiment, a polypeptide of the invention, or polynucleotides, antibodies, agonists, or antagonists corresponding to that polypeptide, may be used to treat diseases and disorders of the immune system and/or to inhibit or enhance an immune response generated by cells associated with the tissue(s) in which the polypeptide of the invention is expressed, including one, two, three, four, five, or more tissues disclosed in Table 1A, column 8 (Tissue Distribution Library Code).

[0496] Polynucleotides, polypeptides, antibodies, and/or agonists or antagonists of the present invention may be useful in treating, preventing, diagnosing, and/or prognosing immunodeficiencies, including both congenital and acquired immunodeficiencies. Examples of B cell immunodeficiencies in which immunoglobulin levels B cell function and/or B cell numbers are decreased include: X-linked agammaglobulinemia (Bruton's disease), X-linked infantile agammaglobulinemia, X-linked immunodeficiency with hyper IgM, non X-linked immunodeficiency with hyper IgM, X-linked lymphoproliferative syndrome (XLP), agammaglobulinemia including congenital and acquired agammaglobulinemia, adult onset agammaglobulinemia, late-onset agammaglobulinemia, dysgammaglobulinemia, hypogammaglobulinemia, unspecified hypogammaglobulinemia, recessive agammaglobulinemia (Swiss type), Selective IgM deficiency, selective IgA deficiency, selective IgG subclass deficiencies, IgG subclass deficiency (with or without IgA deficiency), Ig deficiency with increased IgM, IgG and IgA deficiency with increased IgM, antibody deficiency with normal or elevated Igs, Ig heavy chain deletions, kappa chain deficiency, B cell lymphoproliferative disorder (BLPD), common variable immunodeficiency (CVID), common variable immunodeficiency (CVI) (acquired), and transient hypogammaglobulinemia of infancy.

[0497] In specific embodiments, ataxia-telangiectasia or conditions associated with ataxia-telangiectasia are treated, prevented, diagnosed, and/or prognosing using the polypeptides or polynucleotides of the invention, and/or agonists or antagonists thereof.

[0498] Examples of congenital immunodeficiencies in which T cell and/or B cell function and/or number is decreased include, but are not limited to: DiGeorge anomaly, severe combined immunodeficiencies (SCID) (including, but not limited to, X-linked SCID, autosomal recessive SCID, adenosine deaminase deficiency, purine nucleoside phosphorylase (PNP) deficiency, Class II MHC deficiency (Bare lymphocyte syndrome), Wiskott-Aldrich syndrome, and ataxia telangiectasia), thymic hypoplasia, third and fourth pharyngeal pouch syndrome, 22q11.2 deletion, chronic mucocutaneous candidiasis, natural killer cell deficiency (NK), idiopathic CD4+ T-lymphocytopenia, immunodeficiency with predominant T cell defect (unspecified), and unspecified immunodeficiency of cell mediated immunity.

[0499] In specific embodiments, DiGeorge anomaly or conditions associated with DiGeorge anomaly are treated, prevented, diagnosed, and/or prognosed using polypeptides or polynucleotides of the invention, or antagonists or agonists thereof.

[0500] Other immunodeficiencies that may be treated, prevented, diagnosed, and/or prognosed using polypeptides or polynucleotides of the invention, and/or agonists or antagonists thereof, include, but are not limited to, chronic granulomatous disease, Chédiak-Higashi syndrome, myeloperoxidase deficiency, leukocyte glucose-6-phosphate dehydrogenase deficiency, X-linked lymphoproliferative syndrome (XLP), leukocyte adhesion deficiency, complement component deficiencies (including C1, C2, C3, C4, C5, C6, C7, C8 and/or C9 deficiencies), reticular dysgenesis, thymic alymphoplasia-aplasia, immunodeficiency with thymoma, severe congenital leukopenia, dysplasia with immunodeficiency, neonatal neutropenia, short limbed dwarfism, and Nezelof syndrome-combined immunodeficiency with Igs.

[0501] In a preferred embodiment, the immunodeficiencies and/or conditions associated with the immunodeficiencies recited above are treated, prevented, diagnosed and/or prognosed using polynucleotides, polypeptides, antibodies, and/or agonists or antagonists of the present invention.

[0502] In a preferred embodiment polynucleotides, polypeptides, antibodies, and/or agonists or antagonists of the present invention could be used as an agent to boost immunoresponsiveness among immunodeficient individuals. In specific embodiments, polynucleotides, polypeptides, antibodies, and/or agonists or antagonists of the present invention could be used as an agent to boost immunoresponsiveness among B cell and/or T cell immunodeficient individuals.

[0503] The polynucleotides, polypeptides, antibodies, and/or agonists or antagonists of the present invention may be useful in treating, preventing, diagnosing and/or prognosing autoimmune disorders. Many autoimmune disorders result from inappropriate recognition of self as foreign material by immune cells. This inappropriate recognition results in an immune response leading to the destruction of the host tissue. Therefore, the administration of polynucleotides and polypeptides of the invention that can inhibit an immune response, particularly the proliferation, differentiation, or chemotaxis of T-cells, may be an effective therapy in preventing autoimmune disorders.

[0504] Autoimmune diseases or disorders that may be treated, prevented, diagnosed and/or prognosed by polynucleotides, polypeptides, antibodies, and/or agonists or antagonists of the present invention include, but are not limited to, one or more of the following: systemic lupus erythematosus, rheumatoid arthritis, ankylosing spondylitis, multiple sclerosis, autoimmune thyroiditis, Hashimoto's thyroiditis, autoimmune hemolytic anemia, hemolytic anemia, thrombocytopenia, autoimmune thrombocytopenia purpura, autoimmune neonatal thrombocytopenia, idiopathic thrombocytopenia purpura, purpura (e.g., Henloch-Scoenlein purpura), autoimmunocytopenia, Goodpasture's syndrome, Pemphigus vulgaris, myasthenia gravis, Grave's disease (hyperthyroidism), and insulin-resistant diabetes mellitus.

[0505] Additional disorders that are likely to have an autoimmune component that may be treated, prevented, and/or diagnosed with the compositions of the invention include, but are not limited to, type II collagen-induced arthritis, antiphospholipid syndrome, dermatitis, allergic encephalomyelitis, myocarditis, relapsing polychondritis, rheumatic heart disease, neuritis, uveitis ophthalmia, polyendocrinopathies, Reiter's Disease, Stiff-Man Syndrome, autoimmune pulmonary inflammation, autism, Guillain-Barre Syndrome, insulin dependent diabetes mellitus, and autoimmune inflammatory eye disorders.

[0506] Additional disorders that are likely to have an autoimmune component that may be treated, prevented, diagnosed and/or prognosed with the compositions of the invention include, but are not limited to, scleroderma with anti-collagen antibodies (often characterized, e.g., by nucleolar and other nuclear antibodies), mixed connective tissue disease (often characterized, e.g., by antibodies to extractable nuclear antigens (e.g., ribonucleoprotein)), polymyositis (often characterized, e.g., by nonhistone ANA), pernicious anemia (often characterized, e.g., by antiparietal cell, microsomes, and intrinsic factor antibodies), idiopathic Addison's disease (often characterized, e.g., by humoral and cell-mediated adrenal cytotoxicity, infertility (often characterized, e.g., by antispermatozoal antibodies), glomerulonephritis (often characterized, e.g., by glomerular basement membrane antibodies or immune complexes), bullous pemphigoid (often characterized, e.g., by IgG and complement in basement membrane), Sjogren's syndrome (often characterized, e.g., by multiple tissue antibodies, and/or a specific nonhistone ANA (SS-B)), diabetes mellitus (often characterized, e.g., by cell-mediated and humoral islet cell antibodies), and adrenergic drug resistance (including adrenergic drug resistance with asthma or cystic fibrosis) (often characterized, e.g., by beta-adrenergic receptor antibodies).

[0507] Additional disorders that may have an autoimmune component that may be treated, prevented, diagnosed and/or prognosed with the compositions of the invention include, but are not limited to, chronic active hepatitis (often characterized, e.g., by smooth muscle antibodies), primary biliary cirrhosis (often characterized, e.g., by mitochondria antibodies), other endocrine gland failure (often characterized, e.g., by specific tissue antibodies in some cases), vitiligo (often characterized, e.g., by melanocyte antibodies), vasculitis (often characterized, e.g., by Ig and complement in vessel walls and/or low serum complement), post-MI (often characterized, e.g., by myocardial antibodies), cardiotomy syndrome (often characterized, e.g., by myocardial antibodies), urticaria (often characterized, e.g., by IgG and IgM antibodies to IgE), atopic dermatitis (often characterized, e.g., by IgG and IgM antibodies to IgE), asthma (often characterized, e.g., by IgG and IgM antibodies to IgE), and many other inflammatory, granulomatous, degenerative, and atrophic disorders.

[0508] In a preferred embodiment, the autoimmune diseases and disorders and/or conditions associated with the diseases and disorders recited above are treated, prevented, diagnosed and/or prognosed using for example, antagonists or agonists, polypeptides or polynucleotides, or antibodies of the present invention. In a specific preferred embodiment, rheumatoid arthritis is treated, prevented, and/or diagnosed using polynucleotides, polypeptides, antibodies, and/or agonists or antagonists of the present invention.

[0509] In another specific preferred embodiment, systemic lupus erythematosus is treated, prevented, and/or diagnosed using polynucleotides, polypeptides, antibodies, and/or agonists or antagonists of the present invention. In another specific preferred embodiment, idiopathic thrombocytopenia purpura is treated, prevented, and/or diagnosed using polynucleotides, polypeptides, antibodies, and/or agonists or antagonists of the present invention.

[0510] In another specific preferred embodiment IgA nephropathy is treated, prevented, and/or diagnosed using polynucleotides, polypeptides, antibodies, and/or agonists or antagonists of the present invention.

[0511] In a preferred embodiment, the autoimmune diseases and disorders and/or conditions associated with the diseases and disorders recited above are treated, prevented, diagnosed and/or prognosed using polynucleotides, polypeptides, antibodies, and/or agonists or antagonists of the present invention

[0512] In preferred embodiments, polypeptides, antibodies, polynucleotides and/or agonists or antagonists of the present invention are used as a immunosuppressive agent(s).

[0513] Polynucleotides, polypeptides, antibodies, and/or agonists or antagonists of the present invention may be useful in treating, preventing, prognosing, and/or diagnosing diseases, disorders, and/or conditions of hematopoietic cells. Polynucleotides, polypeptides, antibodies, and/or agonists or antagonists of the present invention could be used to increase differentiation and proliferation of hematopoietic cells, including the pluripotent stem cells, in an effort to treat or prevent those diseases, disorders, and/or conditions associated with a decrease in certain (or many) types hematopoietic cells, including but not limited to, leukopenia, neutropenia, anemia, and thrombocytopenia. Alternatively, Polynucleotides, polypeptides, antibodies, and/or agonists or antagonists of the present invention could be used to increase differentiation and proliferation of hematopoietic cells, including the pluripotent stem cells, in an effort to treat or prevent those diseases, disorders, and/or conditions associated with an increase in certain (or many) types of hematopoietic cells, including but not limited to, histiocytosis.

[0514] Allergic reactions and conditions, such as asthma (particularly allergic asthma) or other respiratory problems, may also be treated, prevented, diagnosed and/or prognosed using polypeptides, antibodies, or polynucleotides of the invention, and/or agonists or antagonists thereof. Moreover, these molecules can be used to treat, prevent, prognose, and/or diagnose anaphylaxis, hypersensitivity to an antigenic molecule, or blood group incompatibility.

[0515] Additionally, polypeptides or polynucleotides of the invention, and/or agonists or antagonists thereof, may be used to treat, prevent, diagnose and/or prognose IgE-mediated allergic reactions. Such allergic reactions include, but are not limited to, asthma, rhinitis, and eczema. In specific embodiments, polynucleotides, polypeptides, antibodies, and/or agonists or antagonists of the present invention may be used to modulate IgE concentrations in vitro or in vivo.

[0516] Moreover, polynucleotides, polypeptides, antibodies, and/or agonists or antagonists of the present invention have uses in the diagnosis, prognosis, prevention, and/or treatment of inflammatory conditions. For example, since polypeptides, antibodies, or polynucleotides of the invention, and/or agonists or antagonists of the invention may inhibit the activation, proliferation and/or differentiation of cells involved in an inflammatory response, these molecules can be used to prevent and/or treat chronic and acute inflammatory conditions. Such inflammatory conditions include, but are not limited to, for example, inflammation associated with infection (e.g., septic shock, sepsis, or systemic inflammatory response syndrome), ischemia-reperfusion injury, endotoxin lethality, complement-mediated hyperacute rejection, nephritis, cytokine or chemokine induced lung injury, inflammatory bowel disease, Crohn's disease, over production of cytokines (e.g., TNF or IL-1.), respiratory disorders (e.g., asthma and allergy); gastrointestinal disorders (e.g., inflammatory bowel disease); cancers (e.g., gastric, ovarian, lung, bladder, liver, and breast); CNS disorders (e.g., multiple sclerosis; ischemic brain injury and/or stroke, traumatic brain injury, neurodegenerative disorders (e.g., Parkinson's disease and Alzheimer's disease); AIDS-related dementia; and prion disease); cardiovascular disorders (e.g., atherosclerosis, myocarditis, cardiovascular disease, and cardiopulmonary bypass complications); as well as many additional diseases, conditions, and disorders that are characterized by inflammation (e.g., hepatitis, rheumatoid arthritis, gout, trauma, pancreatitis, sarcoidosis, dermatitis, renal ischemia-reperfusion injury, Grave's disease, systemic lupus erythematosus, diabetes mellitus, and allogenic transplant rejection).

[0517] Because inflammation is a fundamental defense mechanism, inflammatory disorders can effect virtually any tissue of the body. Accordingly, polynucleotides, polypeptides, and antibodies of the invention, as well as agonists or antagonists thereof, have uses in the treatment of tissue-specific inflammatory disorders, including, but not limited to, adrenalitis, alveolitis, angiocholecystitis, appendicitis, balanitis, blepharitis, bronchitis, bursitis, carditis, cellulitis, cervicitis, cholecystitis, chorditis, cochlitis, colitis, conjunctivitis, cystitis, dermatitis, diverticulitis, encephalitis, endocarditis, esophagitis, eustachitis, fibrositis, folliculitis, gastritis, gastroenteritis, gingivitis, glossitis, hepatosplenitis, keratitis, labyrinthitis, laryngitis, lymphangitis, mastitis, media otitis, meningitis, metritis, mucitis, myocarditis, myosititis, myringitis, nephritis, neuritis, orchitis, osteochondritis, otitis, pericarditis, peritendonitis, peritonitis, pharyngitis, phlebitis, poliomyelitis, prostatitis, pulpitis, retinitis, rhinitis, salpingitis, scleritis, sclerochoroiditis, scrotitis, sinusitis, spondylitis, steatitis, stomatitis, synovitis, syringitis, tendonitis, tonsillitis, urethritis, and vaginitis.

[0518] In specific embodiments, polypeptides, antibodies, or polynucleotides of the invention, and/or agonists or antagonists thereof, are useful to diagnose, prognose, prevent, and/or treat organ transplant rejections and graft-versus-host disease. Organ rejection occurs by host immune cell destruction of the transplanted tissue through an immune response. Similarly, an immune response is also involved in GVHD, but, in this case, the foreign transplanted immune cells destroy the host tissues. Polypeptides, antibodies, or polynucleotides of the invention, and/or agonists or antagonists thereof, that inhibit an immune response, particularly the activation, proliferation, differentiation, or chemotaxis of T-cells, may be an effective therapy in preventing organ rejection or GVHD. In specific embodiments, polypeptides, antibodies, or polynucleotides of the invention, and/or agonists or antagonists thereof, that inhibit an immune response, particularly the activation, proliferation, differentiation, or chemotaxis of T-cells, may be an effective therapy in preventing experimental allergic and hyperacute xenograft rejection.

[0519] In other embodiments, polypeptides, antibodies, or polynucleotides of the invention, and/or agonists or antagonists thereof, are useful to diagnose, prognose, prevent, and/or treat immune complex diseases, including, but not limited to, serum sickness, post streptococcal glomerulonephritis, polyarteritis nodosa, and immune complex-induced vasculitis.

[0520] Polypeptides, antibodies, polynucleotides and/or agonists or antagonists of the invention can be used to treat, detect, and/or prevent infectious agents. For example, by increasing the immune response, particularly increasing the proliferation activation and/or differentiation of B and/or T cells, infectious diseases may be treated, detected, and/or prevented. The immune response may be increased by either enhancing an existing immune response, or by initiating a new immune response. Alternatively, polynucleotides, polypeptides, antibodies, and/or agonists or antagonists of the present invention may also directly inhibit the infectious agent (refer to section of application listing infectious agents, etc), without necessarily eliciting an immune response.

[0521] In another embodiment, polypeptides, antibodies, polynucleotides and/or agonists or antagonists of the present invention are used as a vaccine adjuvant that enhances immune responsiveness to an antigen. In a specific embodiment, polypeptides, antibodies, polynucleotides and/or agonists or antagonists of the present invention are used as an adjuvant to enhance tumor-specific immune responses.

[0522] In another specific embodiment, polypeptides, antibodies, polynucleotides and/or agonists or antagonists of the present invention are used as an adjuvant to enhance anti-viral immune responses. Anti-viral immune responses that may be enhanced using the compositions of the invention as an adjuvant, include virus and virus associated diseases or symptoms described herein or otherwise known in the art. In specific embodiments, the compositions of the invention are used as an adjuvant to enhance an immune response to a virus, disease, or symptom selected from the group consisting of: AIDS, meningitis, Dengue, EBV, and hepatitis (e.g., hepatitis B). In another specific embodiment, the compositions of the invention are used as an adjuvant to enhance an immune response to a virus, disease, or symptom selected from the group consisting of: HIV/AIDS, respiratory syncytial virus, Dengue, rotavirus, Japanese B encephalitis, influenza A and B, parainfluenza, measles, cytomegalovirus, rabies, Junin, Chikungunya, Rift Valley Fever, herpes simplex, and yellow fever.

[0523] In another specific embodiment, polypeptides, antibodies, polynucleotides and/or agonists or antagonists of the present invention are used as an adjuvant to enhance anti-bacterial or anti-fungal immune responses. Anti-bacterial or anti-fungal immune responses that may be enhanced using the compositions of the invention as an adjuvant, include bacteria or fungus and bacteria or fungus associated diseases or symptoms described herein or otherwise known in the art. In specific embodiments, the compositions of the invention are used as an adjuvant to enhance an immune response to a bacteria or fungus, disease, or symptom selected from the group consisting of: tetanus, Diphtheria, botulism, and meningitis type B.

[0524] In another specific embodiment, the compositions of the invention are used as an adjuvant to enhance an immune response to a bacteria or fungus, disease, or symptom selected from the group consisting of: Vibrio cholerae, Mycobacterium leprae, Salmonella typhi, Salmonella paratyphi, Meisseria meningitidis, Streptococcus pneumoniae, Group B streptococcus, Shigella spp., Enterotoxigenic Escherichia coli, Enterohemorrhagic E. coli, and Borrelia burgdorferi.

[0525] In another specific embodiment, polypeptides, antibodies, polynucleotides and/or agonists or antagonists of the present invention are used as an adjuvant to enhance anti-parasitic immune responses. Anti-parasitic immune responses that may be enhanced using the compositions of the invention as an adjuvant, include parasite and parasite associated diseases or symptoms described herein or otherwise known in the art. In specific embodiments, the compositions of the invention are used as an adjuvant to enhance an immune response to a parasite. In another specific embodiment, the compositions of the invention are used as an adjuvant to enhance an immune response to Plasmodium (malaria) or Leishmania.

[0526] In another specific embodiment, polypeptides, antibodies, polynucleotides and/or agonists or antagonists of the present invention may also be employed to treat infectious diseases including silicosis, sarcoidosis, and idiopathic pulmonary fibrosis; for example, by preventing the recruitment and activation of mononuclear phagocytes.

[0527] In another specific embodiment, polypeptides, antibodies, polynucleotides and/or agonists or antagonists of the present invention are used as an antigen for the generation of antibodies to inhibit or enhance immune mediated responses against polypeptides of the invention.

[0528] In one embodiment, polypeptides, antibodies, polynucleotides and/or agonists or antagonists of the present invention are administered to an animal (e.g., mouse, rat, rabbit, hamster, guinea pig, pigs, micro-pig, chicken, camel, goat, horse, cow, sheep, dog, cat, non-human primate, and human, most preferably human) to boost the immune system to produce increased quantities of one or more antibodies (e.g., IgG, IgA, IgM, and IgE), to induce higher affinity antibody production and immunoglobulin class switching (e.g., IgG, IgA, IgM, and IgE), and/or to increase an immune response.

[0529] In another specific embodiment, polypeptides, antibodies, polynucleotides and/or agonists or antagonists of the present invention are used as a stimulator of B cell responsiveness to pathogens.

[0530] In another specific embodiment, polypeptides, antibodies, polynucleotides and/or agonists or antagonists of the present invention are used as an activator of T cells.

[0531] In another specific embodiment, polypeptides, antibodies, polynucleotides and/or agonists or antagonists of the present invention are used as an agent that elevates the immune status of an individual prior to their receipt of immunosuppressive therapies.

[0532] In another specific embodiment, polypeptides, antibodies, polynucleotides and/or agonists or antagonists of the present invention are used as an agent to induce higher affinity antibodies.

[0533] In another specific embodiment, polypeptides, antibodies, polynucleotides and/or agonists or antagonists of the present invention are used as an agent to increase serum immunoglobulin concentrations.

[0534] In another specific embodiment, polypeptides, antibodies, polynucleotides and/or agonists or antagonists of the present invention are used as an agent to accelerate recovery of immunocompromised individuals.

[0535] In another specific embodiment, polypeptides, antibodies, polynucleotides and/or agonists or antagonists of the present invention are used as an agent to boost immunoresponsiveness among aged populations and/or neonates.

[0536] In another specific embodiment, polypeptides, antibodies, polynucleotides and/or agonists or antagonists of the present invention are used as an immune system enhancer prior to, during, or after bone marrow transplant and/or other transplants (e.g., allogeneic or xenogeneic organ transplantation). With respect to transplantation, compositions of the invention may be administered prior to, concomitant with, and/or after transplantation. In a specific embodiment, compositions of the invention are administered after transplantation, prior to the beginning of recovery of T-cell populations. In another specific embodiment, compositions of the invention are first administered after transplantation after the beginning of recovery of T cell populations, but prior to full recovery of B cell populations.

[0537] In another specific embodiment, polypeptides, antibodies, polynucleotides and/or agonists or antagonists of the present invention are used as an agent to boost immunoresponsiveness among individuals having an acquired loss of B cell function. Conditions resulting in an acquired loss of B cell function that may be ameliorated or treated by administering the polypeptides, antibodies, polynucleotides and/or agonists or antagonists thereof, include, but are not limited to, HIV Infection, AIDS, bone marrow transplant, and B cell chronic lymphocytic leukemia (CLL).

[0538] In another specific embodiment, polypeptides, antibodies, polynucleotides and/or agonists or antagonists of the present invention are used as an agent to boost immunoresponsiveness among individuals having a temporary immune deficiency. Conditions resulting in a temporary immune deficiency that may be ameliorated or treated by administering the polypeptides, antibodies, polynucleotides and/or agonists or antagonists thereof, include, but are not limited to, recovery from viral infections (e.g., influenza), conditions associated with malnutrition, recovery from infectious mononucleosis, or conditions associated with stress, recovery from measles, recovery from blood transfusion, and recovery from surgery.

[0539] In another specific embodiment, polypeptides, antibodies, polynucleotides and/or agonists or antagonists of the present invention are used as a regulator of antigen presentation by monocytes, dendritic cells, and/or B-cells. In one embodiment, polynucleotides, polypeptides, antibodies, and/or agonists or antagonists of the present invention enhance antigen presentation or antagonizes antigen presentation in vitro or in vivo. Moreover, in related embodiments, said enhancement or antagonism of antigen presentation may be useful as an anti-tumor treatment or to modulate the immune system.

[0540] In another specific embodiment, polypeptides, antibodies, polynucleotides and/or agonists or antagonists of the present invention are used as an agent to direct an individual's immune system towards development of a humoral response (i.e. TH2) as opposed to a TH1 cellular response.

[0541] In another specific embodiment, polypeptides, antibodies, polynucleotides and/or agonists or antagonists of the present invention are used as a means to induce tumor proliferation and thus make it more susceptible to anti-neoplastic agents. For example, multiple myeloma is a slowly dividing disease and is thus refractory to virtually all anti-neoplastic regimens. If these cells were forced to proliferate more rapidly their susceptibility profile would likely change.

[0542] In another specific embodiment, polypeptides, antibodies, polynucleotides and/or agonists or antagonists of the present invention are used as a stimulator of B cell production in pathologies such as AIDS, chronic lymphocyte disorder and/or Common Variable Immunodificiency.

[0543] In another specific embodiment, polypeptides, antibodies, polynucleotides and/or agonists or antagonists of the present invention are used as a therapy for generation and/or regeneration of lymphoid tissues following surgery, trauma or genetic defect. In another specific embodiment, polypeptides, antibodies, polynucleotides and/or agonists or antagonists of the present invention are used in the pretreatment of bone marrow samples prior to transplant.

[0544] In another specific embodiment, polypeptides, antibodies, polynucleotides and/or agonists or antagonists of the present invention are used as a gene-based therapy for genetically inherited disorders resulting in immuno-incompetence/immunodeficiency such as observed among SCID patients.

[0545] In another specific embodiment, polypeptides, antibodies, polynucleotides and/or agonists or antagonists of the present invention are used as a means of activating monocytes/macrophages to defend against parasitic diseases that effect monocytes such as Leishmania.

[0546] In another specific embodiment, polypeptides, antibodies, polynucleotides and/or agonists or antagonists of the present invention are used as a means of regulating secreted cytokines that are elicited by polypeptides of the invention.

[0547] In another embodiment, polypeptides, antibodies, polynucleotides and/or agonists or antagonists of the present invention are used in one or more of the applications decribed herein, as they may apply to veterinary medicine.

[0548] In another specific embodiment, polypeptides, antibodies, polynucleotides and/or agonists or antagonists of the present invention are used as a means of blocking various aspects of immune responses to foreign agents or self. Examples of diseases or conditions in which blocking of certain aspects of immune responses may be desired include autoimmune disorders such as lupus, and arthritis, as well as immunoresponsiveness to skin allergies, inflammation, bowel disease, injury and diseases/disorders associated with pathogens.

[0549] In another specific embodiment, polypeptides, antibodies, polynucleotides and/or agonists or antagonists of the present invention are used as a therapy for preventing the B cell proliferation and Ig secretion associated with autoimmune diseases such as idiopathic thrombocytopenic purpura, systemic lupus erythematosus and multiple sclerosis.

[0550] In another specific embodiment, polypeptides, antibodies, polynucleotides and/or agonists or antagonists of the present invention are used as a inhibitor of B and/or T cell migration in endothelial cells. This activity disrupts tissue architecture or cognate responses and is useful, for example in disrupting immune responses, and blocking sepsis.

[0551] In another specific embodiment, polypeptides, antibodies, polynucleotides and/or agonists or antagonists of the present invention are used as a therapy for chronic hypergammaglobulinemia evident in such diseases as monoclonal gammopathy of undetermined significance (MGUS), Waldenstrom's disease, related idiopathic monoclonal gammopathies, and plasmacytomas.

[0552] In another specific embodiment, polypeptides, antibodies, polynucleotides and/or agonists or antagonists of the present invention may be employed for instance to inhibit polypeptide chemotaxis and activation of macrophages and their precursors, and of neutrophils, basophils, B lymphocytes and some T-cell subsets, e.g., activated and CD8 cytotoxic T cells and natural killer cells, in certain autoimmune and chronic inflammatory and infective diseases. Examples of autoimmune diseases are described herein and include multiple sclerosis, and insulin-dependent diabetes.

[0553] The polypeptides, antibodies, polynucleotides and/or agonists or antagonists of the present invention may also be employed to treat idiopathic hyper-eosinophilic syndrome by, for example, preventing eosinophil production and migration.

[0554] In another specific embodiment, polypeptides, antibodies, polynucleotides and/or agonists or antagonists of the present invention are used to enhance or inhibit complement mediated cell lysis.

[0555] In another specific embodiment, polypeptides, antibodies, polynucleotides and/or agonists or antagonists of the present invention are used to enhance or inhibit antibody dependent cellular cytotoxicity.

[0556] In another specific embodiment, polypeptides, antibodies, polynucleotides and/or agonists or antagonists of the present invention may also be employed for treating atherosclerosis, for example, by preventing monocyte infiltration in the artery wall.

[0557] In another specific embodiment, polypeptides, antibodies, polynucleotides and/or agonists or antagonists of the present invention may be employed to treat adult respiratory distress syndrome (ARDS).

[0558] In another specific embodiment, polypeptides, antibodies, polynucleotides and/or agonists or antagonists of the present invention may be useful for stimulating wound and tissue repair, stimulating angiogenesis, and/or stimulating the repair of vascular or lymphatic diseases or disorders. Additionally, agonists and antagonists of the invention may be used to stimulate the regeneration of mucosal surfaces.

[0559] In a specific embodiment, polynucleotides or polypeptides, and/or agonists thereof are used to diagnose, prognose, treat, and/or prevent a disorder characterized by primary or acquired immunodeficiency, deficient serum immunoglobulin production, recurrent infections, and/or immune system dysfunction. Moreover, polynucleotides or polypeptides, and/or agonists thereof may be used to treat or prevent infections of the joints, bones, skin, and/or parotid glands, blood-borne infections (e.g., sepsis, meningitis, septic arthritis, and/or osteomyelitis), autoimmune diseases (e.g., those disclosed herein), inflammatory disorders, and malignancies, and/or any disease or disorder or condition associated with these infections, diseases, disorders and/or malignancies) including, but not limited to, CVID, other primary immune deficiencies, HIV disease, CLL, recurrent bronchitis, sinusitis, otitis media, conjunctivitis, pneumonia, hepatitis, meningitis, herpes zoster (e.g., severe herpes zoster), and/or pneumocystis carnii. Other diseases and disorders that may be prevented, diagnosed, prognosed, and/or treated with polynucleotides or polypeptides, and/or agonists of the present invention include, but are not limited to, HIV infection, HTLV-BLV infection, lymphopenia, phagocyte bactericidal dysfunction anemia, thrombocytopenia, and hemoglobinuria.

[0560] In another embodiment, polynucleotides, polypeptides, antibodies, and/or agonists or antagonists of the present invention are used to treat, and/or diagnose an individual having common variable immunodeficiency disease (“CVID”; also known as “acquired agammaglobulinemia” and “acquired hypogammaglobulinemia”) or a subset of this disease.

[0561] In a specific embodiment, polynucleotides, polypeptides, antibodies, and/or agonists or antagonists of the present invention may be used to diagnose, prognose, prevent, and/or treat cancers or neoplasms including immune cell or immune tissue-related cancers or neoplasms. Examples of cancers or neoplasms that may be prevented, diagnosed, or treated by polynucleotides, polypeptides, antibodies, and/or agonists or antagonists of the present invention include, but are not limited to, acute myelogenous leukemia, chronic myelogenous leukemia, Hodgkin's disease, non-Hodgkin's lymphoma, acute lymphocytic anemia (ALL) Chronic lymphocyte leukemia, plasmacytomas, multiple myeloma, Burkitt's lymphoma, EBV-transformed diseases, and/or diseases and disorders described in the section entitled “Hyperproliferative Disorders” elsewhere herein.

[0562] In another specific embodiment, polypeptides, antibodies, polynucleotides and/or agonists or antagonists of the present invention are used as a therapy for decreasing cellular proliferation of Large B-cell Lymphomas.

[0563] In another specific embodiment, polypeptides, antibodies, polynucleotides and/or agonists or antagonists of the present invention are used as a means of decreasing the involvement of B cells and Ig associated with Chronic Myelogenous Leukemia.

[0564] In specific embodiments, the compositions of the invention are used as an agent to boost immunoresponsiveness among B cell immunodeficient individuals, such as, for example, an individual who has undergone a partial or complete splenectomy.

[0565] Antagonists of the invention include, for example, binding and/or inhibitory antibodies, antisense nucleic acids, ribozymes or soluble forms of the polypeptides of the present invention (e.g., Fc fusion protein; see, e.g., Example 9). Agonists of the invention include, for example, binding or stimulatory antibodies, and soluble forms of the polypeptides (e.g., Fc fusion proteins; see, e.g., Example 9). polypeptides, antibodies, polynucleotides and/or agonists or antagonists of the present invention may be employed in a composition with a pharmaceutically acceptable carrier, e.g., as described herein.

[0566] In another embodiment, polypeptides, antibodies, polynucleotides and/or agonists or antagonists of the present invention are administered to an animal (including, but not limited to, those listed above, and also including transgenic animals) incapable of producing functional endogenous antibody molecules or having an otherwise compromised endogenous immune system, but which is capable of producing human immunoglobulin molecules by means of a reconstituted or partially reconstituted immune system from another animal (see, e.g., published PCT Application Nos. WO98/24893, WO/9634096, WO/9633735, and WO/9110741). Administration of polypeptides, antibodies, polynucleotides and/or agonists or antagonists of the present invention to such animals is useful for the generation of monoclonal antibodies against the polypeptides, antibodies, polynucleotides and/or agonists or antagonists of the present invention.

[0567] Blood-Related Disorders

[0568] The polynucleotides, polypeptides, antibodies, and/or agonists or antagonists of the present invention may be used to modulate hemostatic (the stopping of bleeding) or thrombolytic (clot dissolving) activity. For example, by increasing hemostatic or thrombolytic activity, polynucleotides or polypeptides, and/or agonists or antagonists of the present invention could be used to treat or prevent blood coagulation diseases, disorders, and/or conditions (e.g., afibrinogenemia, factor deficiencies, hemophilia), blood platelet diseases, disorders, and/or conditions (e.g., thrombocytopenia), or wounds resulting from trauma, surgery, or other causes. Alternatively, polynucleotides, polypeptides, antibodies, and/or agonists or antagonists of the present invention that can decrease hemostatic or thrombolytic activity could be used to inhibit or dissolve clotting. These molecules could be important in the treatment or prevention of heart attacks (infarction), strokes, or scarring.

[0569] In specific embodiments, the polynucleotides, polypeptides, antibodies, and/or agonists or antagonists of the present invention may be used to prevent, diagnose, prognose, and/or treat thrombosis, arterial thrombosis, venous thrombosis, thromboembolism, pulmonary embolism, atherosclerosis, myocardial infarction, transient ischemic attack, unstable angina. In specific embodiments, the polynucleotides, polypeptides, antibodies, and/or agonists or antagonists of the present invention may be used for the prevention of occulsion of saphenous grafts, for reducing the risk of periprocedural thrombosis as might accompany angioplasty procedures, for reducing the risk of stroke in patients with atrial fibrillation including nonrheumatic atrial fibrillation, for reducing the risk of embolism associated with mechanical heart valves and or mitral valves disease. Other uses for the polynucleotides, polypeptides, antibodies, and/or agonists or antagonists of the present invention, include, but are not limited to, the prevention of occlusions in extrcorporeal devices (e.g., intravascular canulas, vascular access shunts in hemodialysis patients, hemodialysis machines, and cardiopulmonary bypass machines).

[0570] In another embodiment, a polypeptide of the invention, or polynucleotides, antibodies, agonists, or antagonists corresponding to that polypeptide, may be used to prevent, diagnose, prognose, and/or treat diseases and disorders of the blood and/or blood forming organs associated with the tissue(s) in which the polypeptide of the invention is expressed, including one, two, three, four, five, or more tissues disclosed in Table 1A, column 8 (Tissue Distribution Library Code).

[0571] The polynucleotides, polypeptides, antibodies, and/or agonists or antagonists of the present invention may be used to modulate hematopoietic activity (the formation of blood cells). For example, the polynucleotides, polypeptides, antibodies, and/or agonists or antagonists of the present invention may be used to increase the quantity of all or subsets of blood cells, such as, for example, erythrocytes, lymphocytes (B or T cells), myeloid cells (e.g., basophils, eosinophils, neutrophils, mast cells, macrophages) and platelets. The ability to decrease the quantity of blood cells or subsets of blood cells may be useful in the prevention, detection, diagnosis and/or treatment of anemias and leukopenias described below. Alternatively, the polynucleotides, polypeptides, antibodies, and/or agonists or antagonists of the present invention may be used to decrease the quantity of all or subsets of blood cells, such as, for example, erythrocytes, lymphocytes (B or T cells), myeloid cells (e.g., basophils, eosinophils, neutrophils, mast cells, macrophages) and platelets. The ability to decrease the quantity of blood cells or subsets of blood cells may be useful in the prevention, detection, diagnosis and/or treatment of leukocytoses, such as, for example eosinophilia.

[0572] The polynucleotides, polypeptides, antibodies, and/or agonists or antagonists of the present invention may be used to prevent, treat, or diagnose blood dyscrasia.

[0573] Anemias are conditions in which the number of red blood cells or amount of hemoglobin (the protein that carries oxygen) in them is below normal. Anemia may be caused by excessive bleeding, decreased red blood cell production, or increased red blood cell destruction (hemolysis). The polynucleotides, polypeptides, antibodies, and/or agonists or antagonists of the present invention may be useful in treating, preventing, and/or diagnosing anemias. Anemias that may be treated prevented or diagnosed by the polynucleotides, polypeptides, antibodies, and/or agonists or antagonists of the present invention include iron deficiency anemia, hypochromic anemia, microcytic anemia, chlorosis, hereditary siderob;astic anemia, idiopathic acquired sideroblastic anemia, red cell aplasia, megaloblastic anemia (e.g., pernicious anemia, (vitamin B12 deficiency) and folic acid deficiency anemia), aplastic anemia, hemolytic anemias (e.g., autoimmune helolytic anemia, microangiopathic hemolytic anemia, and paroxysmal nocturnal hemoglobinuria). The polynucleotides, polypeptides, antibodies, and/or agonists or antagonists of the present invention may be useful in treating, preventing, and/or diagnosing anemias associated with diseases including but not limited to, anemias associated with systemic lupus erythematosus, cancers, lymphomas, chronic renal disease, and enlarged spleens. The polynucleotides, polypeptides, antibodies, and/or agonists or antagonists of the present invention may be useful in treating, preventing, and/or diagnosing anemias arising from drug treatments such as anemias associated with methyldopa, dapsone, and/or sulfadrugs. Additionally, rhe polynucleotides, polypeptides, antibodies, and/or agonists or antagonists of the present invention may be useful in treating, preventing, and/or diagnosing anemias associated with abnormal red blood cell architecture including but not limited to, hereditary spherocytosis, hereditary elliptocytosis, glucose-6-phosphate dehydrogenase deficiency, and sickle cell anemia.

[0574] The polynucleotides, polypeptides, antibodies, and/or agonists or antagonists of the present invention may be useful in treating, preventing, and/or diagnosing hemoglobin abnormalities, (e.g., those associated with sickle cell anemia, hemoglobin C disease, hemoglobin S-C disease, and hemoglobin E disease). Additionally, the polynucleotides, polypeptides, antibodies, and/or agonists or antagonists of the present invention may be useful in diagnosing, prognosing, preventing, and/or treating thalassemias, including, but not limited to major and minor forms of alpha-thalassemia and beta-thalassemia.

[0575] In another embodiment, the polynucleotides, polypeptides, antibodies, and/or agonists or antagonists of the present invention may be useful in diagnosing, prognosing, preventing, and/or treating bleeding disorders including, but not limited to, thrombocytopenia (e.g., idiopathic thrombocytopenic purpura, and thrombotic thrombocytopenic purpura), Von Willebrand's disease, hereditary platelet disorders (e.g., storage pool disease such as Chediak-Higashi and Hermansky-Pudlak syndromes, thromboxane A2 dysfunction, thromboasthenia, and Bemard-Soulier syndrome), hemolytic-uremic syndrome, hemophelias such as hemophelia A or Factor VII deficiency and Christmas disease or Factor IX deficiency, Hereditary Hemorhhagic Telangiectsia, also known as Rendu-Osler-Weber syndrome, allergic purpura (Henoch Schonlein purpura) and disseminated intravascular coagulation.

[0576] The effect of the polynucleotides, polypeptides, antibodies, and/or agonists or antagonists of the present invention on the clotting time of blood may be monitored using any of the clotting tests known in the art including, but not limited to, whole blood partial thromboplastin time (PTT), the activated partial thromboplastin time (aPTT), the activated clotting time (ACT), the recalcified activated clotting time, or the Lee-White Clotting time.

[0577] Several diseases and a variety of drugs can cause platelet dysfunction. Thus, in a specific embodiment, the polynucleotides, polypeptides, antibodies, and/or agonists or antagonists of the present invention may be useful in diagnosing, prognosing, preventing, and/or treating acquired platelet dysfunction such as platelet dysfunction accompanying kidney failure, leukemia, multiple myeloma, cirrhosis of the liver, and systemic lupus erythematosus as well as platelet dysfunction associated with drug treatments, including treatment with aspirin, ticlopidine, nonsteroidal anti-inflammatory drugs (used for arthritis, pain, and sprains), and penicillin in high doses.

[0578] In another embodiment, the polynucleotides, polypeptides, antibodies, and/or agonists or antagonists of the present invention may be useful in diagnosing, prognosing, preventing, and/or treating diseases and disorders characterized by or associated with increased or decreased numbers of white blood cells. Leukopenia occurs when the number of white blood cells decreases below normal. Leukopenias include, but are not limited to, neutropenia and lymphocytopenia. An increase in the number of white blood cells compared to normal is known as leukocytosis. The body generates increased numbers of white blood cells during infection. Thus, leukocytosis may simply be a normal physiological parameter that reflects infection. Alternatively, leukocytosis may be an indicator of injury or other disease such as cancer. Leokocytoses, include but are not limited to, eosinophilia, and accumulations of macrophages. In specific embodiments, the polynucleotides, polypeptides, antibodies, and/or agonists or antagonists of the present invention may be useful in diagnosing, prognosing, preventing, and/or treating leukopenia. In other specific embodiments, the polynucleotides, polypeptides, antibodies, and/or agonists or antagonists of the present invention may be useful in diagnosing, prognosing, preventing, and/or treating leukocytosis.

[0579] Leukopenia may be a generalized decreased in all types of white blood cells, or may be a specific depletion of particular types of white blood cells. Thus, in specific embodiments, the polynucleotides, polypeptides, antibodies, and/or agonists or antagonists of the present invention may be useful in diagnosing, prognosing, preventing, and/or treating decreases in neutrophil numbers, known as neutropenia. Neutropenias that may be diagnosed, prognosed, prevented, and/or treated by the polynucleotides, polypeptides, antibodies, and/or agonists or antagonists of the present invention include, but are not limited to, infantile genetic agranulocytosis, familial neutropenia, cyclic neutropenia, neutropenias resulting from or associated with dietary deficiencies (e.g., vitamin B 12 deficiency or folic acid deficiency), neutropenias resulting from or associated with drug treatments (e.g., antibiotic regimens such as penicillin treatment, sulfonamide treatment, anticoagulant treatment, anticonvulsant drugs, anti-thyroid drugs, and cancer chemotherapy), and neutropenias resulting from increased neutrophil destruction that may occur in association with some bacterial or viral infections, allergic disorders, autoimmune diseases, conditions in which an individual has an enlarged spleen (e.g., Felty syndrome, malaria and sarcoidosis), and some drug treatment regimens.

[0580] The polynucleotides, polypeptides, antibodies, and/or agonists or antagonists of the present invention may be useful in diagnosing, prognosing, preventing, and/or treating lymphocytopenias (decreased numbers of B and/or T lymphocytes), including, but not limited lymphocytopenias resulting from or associated with stress, drug treatments (e.g., drug treatment with corticosteroids, cancer chemotherapies, and/or radiation therapies), AIDS infection and/or other diseases such as, for example, cancer, rheumatoid arthritis, systemic lupus erythematosus, chronic infections, some viral infections and/or hereditary disorders (e.g., DiGeorge syndrome, Wiskott-Aldrich Syndome, severe combined immunodeficiency, ataxia telangiectsia).

[0581] The polynucleotides, polypeptides, antibodies, and/or agonists or antagonists of the present invention may be useful in diagnosing, prognosing, preventing, and/or treating diseases and disorders associated with macrophage numbers and/or macrophage function including, but not limited to, Gaucher's disease, Niemann-Pick disease, Letterer-Siwe disease and Hand-Schuller-Christian disease.

[0582] In another embodiment, the polynucleotides, polypeptides, antibodies, and/or agonists or antagonists of the present invention may be useful in diagnosing, prognosing, preventing, and/or treating diseases and disorders associated with eosinophil numbers and/or eosinophil function including, but not limited to, idiopathic hypereosinophilic syndrome, eosinophilia-myalgia syndrome, and Hand-Schuller-Christian disease.

[0583] In yet another embodiment, the polynucleotides, polypeptides, antibodies, and/or agonists or antagonists of the present invention may be useful in diagnosing, prognosing, preventing, and/or treating leukemias and lymphomas including, but not limited to, acute lymphocytic (lymphpblastic) leukemia (ALL), acute myeloid (myelocytic, myelogenous, myeloblastic, or myelomonocytic) leukemia, chronic lymphocytic leukemia (e.g., B cell leukemias, T cell leukemias, Sezary syndrome, and Hairy cell leukenia), chronic myelocytic (myeloid, myelogenous, or granulocytic) leukemia, Hodgkin's lymphoma, non-hodgkin's lymphoma, Burkitt's lymphoma, and mycosis fungoides.

[0584] In other embodiments, the polynucleotides, polypeptides, antibodies, and/or agonists or antagonists of the present invention may be useful in diagnosing, prognosing, preventing, and/or treating diseases and disorders of plasma cells including, but not limited to, plasma cell dyscrasias, monoclonal gammaopathies, monoclonal gammopathies of undetermined significance, multiple myeloma, macroglobulinemia, Waldenstrom's macroglobulinemia, cryoglobulinemia, and Raynaud's phenomenon.

[0585] In other embodiments, the polynucleotides, polypeptides, antibodies, and/or agonists or antagonists of the present invention may be useful in treating, preventing, and/or diagnosing myeloproliferative disorders, including but not limited to, polycythemia vera, relative polycythemia, secondary polycythemia, myelofibrosis, acute myelofibrosis, agnogenic myelod metaplasia, thrombocythemia, (including both primary and seconday thrombocythemia) and chronic myelocytic leukemia.

[0586] In other embodiments, the polynucleotides, polypeptides, antibodies, and/or agonists or antagonists of the present invention may be useful as a treatment prior to surgery, to increase blood cell production.

[0587] In other embodiments, the polynucleotides, polypeptides, antibodies, and/or agonists or antagonists of the present invention may be useful as an agent to enhance the migration, phagocytosis, superoxide production, antibody dependent cellular cytotoxicity of neutrophils, eosionophils and macrophages.

[0588] In other embodiments, the polynucleotides, polypeptides, antibodies, and/or agonists or antagonists of the present invention may be useful as an agent to increase the number of stem cells in circulation prior to stem cells pheresis. In another specific embodiment, the polynucleotides, polypeptides, antibodies, and/or agonists or antagonists of the present invention may be useful as an agent to increase the number of stem cells in circulation prior to platelet pheresis.

[0589] In other embodiments, the polynucleotides, polypeptides, antibodies, and/or agonists or antagonists of the present invention may be useful as an agent to increase cytokine production.

[0590] In other embodiments, the polynucleotides, polypeptides, antibodies, and/or agonists or antagonists of the present invention may be useful in preventing, diagnosing, and/or treating primary hematopoietic disorders.

[0591] Hyperproliferative Disorders

[0592] In certain embodiments, polynucleotides or polypeptides, or agonists or antagonists of the present invention can be used to treat or detect hyperproliferative disorders, including neoplasms. Polynucleotides or polypeptides, or agonists or antagonists of the present invention may inhibit the proliferation of the disorder through direct or indirect interactions. Alternatively, Polynucleotides or polypeptides, or agonists or antagonists of the present invention may proliferate other cells which can inhibit the hyperproliferative disorder.

[0593] For example, by increasing an immune response, particularly increasing antigenic qualities of the hyperproliferative disorder or by proliferating, differentiating, or mobilizing T-cells, hyperproliferative disorders can be treated. This immune response may be increased by either enhancing an existing immune response, or by initiating a new immune response. Alternatively, decreasing an immune response may also be a method of treating hyperproliferative disorders, such as a chemotherapeutic agent.

[0594] Examples of hyperproliferative disorders that can be treated or detected by polynucleotides or polypeptides, or agonists or antagonists of the present invention include, but are not limited to neoplasms located in the: colon, abdomen, bone, breast, digestive system, liver, pancreas, peritoneum, endocrine glands (adrenal, parathyroid, pituitary, testicles, ovary, thymus, thyroid), eye, head and neck, nervous (central and peripheral), lymphatic system, pelvis, skin, soft tissue, spleen, thorax, and urogenital tract.

[0595] Similarly, other hyperproliferative disorders can also be treated or detected by polynucleotides or polypeptides, or agonists or antagonists of the present invention. Examples of such hyperproliferative disorders include, but are not limited to: Acute Childhood Lymphoblastic Leukemia, Acute Lymphoblastic Leukemia, Acute Lymphocytic Leukemia, Acute Myeloid Leukemia, Adrenocortical Carcinoma, Adult (Primary) Hepatocellular Cancer, Adult (Primary) Liver Cancer, Adult Acute Lymphocytic Leukemia, Adult Acute Myeloid Leukemia, Adult Hodgkin's Disease, Adult Hodgkin's Lymphoma, Adult Lymphocytic Leukemia, Adult Non-Hodgkin's Lymphoma, Adult Primary Liver Cancer, Adult Soft Tissue Sarcoma, AIDS-Related Lymphoma, AIDS-Related Malignancies, Anal Cancer, Astrocytoma, Bile Duct Cancer, Bladder Cancer, Bone Cancer, Brain Stem Glioma, Brain Tumors, Breast Cancer, Cancer of the Renal Pelvis and Ureter, Central Nervous System (Primary) Lymphoma, Central Nervous System Lymphoma, Cerebellar Astrocytoma, Cerebral Astrocytoma, Cervical Cancer, Childhood (Primary) Hepatocellular Cancer, Childhood (Primary) Liver Cancer, Childhood Acute Lymphoblastic Leukemia, Childhood Acute Myeloid Leukemia, Childhood Brain Stem Glioma, Childhood Cerebellar Astrocytoma, Childhood Cerebral Astrocytoma, Childhood Extracranial Germ Cell Tumors, Childhood Hodgkin's Disease, Childhood Hodgkin's Lymphoma, Childhood Hypothalamic and Visual Pathway Glioma, Childhood Lymphoblastic Leukemia, Childhood Medulloblastoma, Childhood Non-Hodgkin's Lymphoma, Childhood Pineal and Supratentorial Primitive Neuroectodermal Tumors, Childhood Primary Liver Cancer, Childhood Rhabdomyosarcoma, Childhood Soft Tissue Sarcoma, Childhood Visual Pathway and Hypothalamic Glioma, Chronic Lymphocytic Leukemia, Chronic Myelogenous Leukemia, Colon Cancer, Cutaneous T-Cell Lymphoma, Endocrine Pancreas Islet Cell Carcinoma, Endometrial Cancer, Ependymoma, Epithelial Cancer, Esophageal Cancer, Ewing's Sarcoma and Related Tumors, Exocrine Pancreatic Cancer, Extracranial Germ Cell Tumor, Extragonadal Germ Cell Tumor, Extrahepatic Bile Duct Cancer, Eye Cancer, Female Breast Cancer, Gaucher's Disease, Gallbladder Cancer, Gastric Cancer, Gastrointestinal Carcinoid Tumor, Gastrointestinal Tumors, Germ Cell Tumors, Gestational Trophoblastic Tumor, Hairy Cell Leukemia, Head and Neck Cancer, Hepatocellular Cancer, Hodgkin's Disease, Hodgkin's Lymphoma, Hypergammaglobulinemia, Hypopharyngeal Cancer, Intestinal Cancers, Intraocular Melanoma, Islet Cell Carcinoma, Islet Cell Pancreatic Cancer, Kaposi's Sarcoma, Kidney Cancer, Laryngeal Cancer, Lip and Oral Cavity Cancer, Liver Cancer, Lung Cancer, Lymphoproliferative Disorders, Macroglobulinemia, Male Breast Cancer, Malignant Mesothelioma, Malignant Thymoma, Medulloblastoma, Melanoma, Mesothelioma, Metastatic Occult Primary Squamous Neck Cancer, Metastatic Primary Squamous Neck Cancer, Metastatic Squamous Neck Cancer, Multiple Myeloma, Multiple Myeloma/Plasma Cell Neoplasm, Myelodysplastic Syndrome, Myelogenous Leukemia, Myeloid Leukemia, Mycloproliferative Disorders, Nasal Cavity and Paranasal Sinus Cancer, Nasopharyngeal Cancer, Neuroblastoma, Non-Hodgkin's Lymphoma During Pregnancy, Nonmelanoma Skin Cancer, Non-Small Cell Lung Cancer, Occult Primary Metastatic Squamous Neck Cancer, Oropharyngeal Cancer, Osteo-/Malignant Fibrous Sarcoma, Osteosarcoma/Malignant Fibrous Histiocytoma, Osteosarcoma/Malignant Fibrous Histiocytoma of Bone, Ovarian Epithelial Cancer, Ovarian Germ Cell Tumor, Ovarian Low Malignant Potential Tumor, Pancreatic Cancer, Paraproteinemias, Purpura, Parathyroid Cancer, Penile Cancer, Pheochromocytoma, Pituitary Tumor, Plasma Cell Neoplasmi/Multiple Myeloma, Primary Central Nervous System Lymphoma, Primary Liver Cancer, Prostate Cancer, Rectal Cancer, Renal Cell Cancer, Renal Pelvis and Ureter Cancer, Retinoblastoma, Rhabdomyosarcoma, Salivary Gland Cancer, Sarcoidosis Sarcomas, Sezary Syndrome, Skin Cancer, Small Cell Lung Cancer, Small Intestine Cancer, Soft Tissue Sarcoma, Squamous Neck Cancer, Stomach Cancer, Supratentorial Primitive Neuroectodernal and Pineal Tumors, T-Cell Lymphoma, Testicular Cancer, Thymoma, Thyroid Cancer, Transitional Cell Cancer of the Renal Pelvis and Ureter, Transitional Renal Pelvis and Ureter Cancer, Trophoblastic Tumors, Ureter and Renal Pelvis Cell Cancer, Urethral Cancer, Uterine Cancer, Uterine Sarcoma, Vaginal Cancer, Visual Pathway and Hypothalamic Glioma, Vulvar Cancer, Waldenstrom's Macroglobulinemia, Wilms' Tumor, and any other hyperproliferative disease, besides neoplasia, located in an organ system listed above.

[0596] In another preferred embodiment, polynucleotides or polypeptides, or agonists or antagonists of the present invention are used to diagnose, prognose, prevent, and/or treat premalignant conditions and to prevent progression to a neoplastic or malignant state, including but not limited to those disorders described above. Such uses are indicated in conditions known or suspected of preceding progression to neoplasia or cancer, in particular, where non-neoplastic cell growth consisting of hyperplasia, metaplasia, or most particularly, dysplasia has occurred (for review of such abnormal growth conditions, see Robbins and Angell, 1976, Basic Pathology, 2d Ed., W. B. Saunders Co., Philadelphia, pp. 68-79.)

[0597] Hyperplasia is a form of controlled cell proliferation, involving an increase in cell number in a tissue or organ, without significant alteration in structure or function. Hyperplastic disorders which can be diagnosed, prognosed, prevented, and/or treated with compositions of the invention (including polynucleotides, polypeptides, agonists or antagonists) include, but are not limited to, angiofollicular mediastinal lymph node hyperplasia, angiolymphoid hyperplasia with eosinophilia, a typical melanocytic hyperplasia, basal cell hyperplasia, benign giant lymph node hyperplasia, cementum hyperplasia, congenital adrenal hyperplasia, congenital sebaceous hyperplasia, cystic hyperplasia, cystic hyperplasia of the breast, denture hyperplasia, ductal hyperplasia, endometrial hyperplasia, fibromuscular hyperplasia, focal epithelial hyperplasia, gingival hyperplasia, inflammatory fibrous hyperplasia, inflammatory papillary hyperplasia, intravascular papillary endothelial hyperplasia, nodular hyperplasia of prostate, nodular regenerative hyperplasia, pseudoepitheliomatous hyperplasia, senile sebaceous hyperplasia, and verrucous hyperplasia.

[0598] Metaplasia is a form of controlled cell growth in which one type of adult or fully differentiated cell substitutes for another type of adult cell. Metaplastic disorders which can be diagnosed, prognosed, prevented, and/or treated with compositions of the invention (including polynucleotides, polypeptides, agonists or antagonists) include, but are not limited to, agnogenic myeloid metaplasia, apocrine metaplasia, a typical metaplasia, autoparenchymatous metaplasia, connective tissue metaplasia, epithelial metaplasia, intestinal metaplasia, metaplastic anemia, metaplastic ossification, metaplastic polyps, myeloid metaplasia, primary myeloid metaplasia, secondary myeloid metaplasia, squamous metaplasia, squamous metaplasia of amnion, and symptomatic myeloid metaplasia.

[0599] Dysplasia is frequently a forerunner of cancer, and is found mainly in the epithelia; it is the most disorderly form of non-neoplastic cell growth, involving a loss in individual cell uniformity and in the architectural orientation of cells. Dysplastic cells often have abnormally large, deeply stained nuclei, and exhibit pleomorphism. Dysplasia characteristically occurs where there exists chronic irritation or inflammation. Dysplastic disorders which can be diagnosed, prognosed, prevented, and/or treated with compositions of the invention (including polynucleotides, polypeptides, agonists or antagonists) include, but are not limited to, anhidrotic ectodermal dysplasia, anterofacial dysplasia, asphyxiating thoracic dysplasia, atriodigital dysplasia, bronchopulmonary dysplasia, cerebral dysplasia, cervical dysplasia, chondroectodermal dysplasia, cleidocranial dysplasia, congenital ectodermal dysplasia, craniodiaphysial dysplasia, craniocarpotarsal dysplasia, craniometaphysial dysplasia, dentin dysplasia, diaphysial dysplasia, ectodermal dysplasia, enamel dysplasia, encephalo-ophthalmic dysplasia, dysplasia epiphysialis hemimelia, dysplasia epiphysialis multiplex, dysplasia epiphysialis punctata, epithelial dysplasia, faciodigitogenital dysplasia, familial fibrous dysplasia of jaws, familial white folded dysplasia, fibromuscular dysplasia, fibrous dysplasia of bone, florid osseous dysplasia, hereditary renal-retinal dysplasia, hidrotic ectodermal dysplasia, hypohidrotic ectodermal dysplasia, lymphopenic thymic dysplasia, mammary dysplasia, mandibulofacial dysplasia, metaphysial dysplasia, Mondini dysplasia, monostotic fibrous dysplasia, mucoepithelial dysplasia, multiple epiphysial dysplasia, oculoauriculovertebral dysplasia, oculodentodigital dysplasia, oculovertebral dysplasia, odontogenic dysplasia, ophthalmomandibulomelic dysplasia, periapical cemental dysplasia, polyostotic fibrous dysplasia, pseudoachondroplastic spondyloepiphysial dysplasia, retinal dysplasia, septo-optic dysplasia, spondyloepiphysial dysplasia, and ventriculoradial dysplasia.

[0600] Additional pre-neoplastic disorders which can be diagnosed, prognosed, prevented, and/or treated with compositions of the invention (including polynucleotides, polypeptides, agonists or antagonists) include, but are not limited to, benign dysproliferative disorders (e.g., benign tumors, fibrocystic conditions, tissue hypertrophy, intestinal polyps, colon polyps, and esophageal dysplasia), leukoplakia, keratoses, Bowen's disease, Farmer's Skin, solar cheilitis, and solar keratosis.

[0601] In another embodiment, a polypeptide of the invention, or polynucleotides, antibodies, agonists, or antagonists corresponding to that polypeptide, may be used to diagnose and/or prognose disorders associated with the tissue(s) in which the polypeptide of the invention is expressed, including one, two, three, four, five, or more tissues disclosed in Table 1A, column 8 (Tissue Distribution Library Code).

[0602] In another embodiment, polynucleotides, polypeptides, antibodies, and/or agonists or antagonists of the present invention conjugated to a toxin or a radioactive isotope, as described herein, may be used to treat cancers and neoplasms, including, but not limited to those described herein. In a further preferred embodiment, polynucleotides, polypeptides, antibodies, and/or agonists or antagonists of the present invention conjugated to a toxin or a radioactive isotope, as described herein, may be used to treat acute myelogenous leukemia.

[0603] Additionally, polynucleotides, polypeptides, and/or agonists or antagonists of the invention may affect apoptosis, and therefore, would be useful in treating a number of diseases associated with increased cell survival or the inhibition of apoptosis. For example, diseases associated with increased cell survival or the inhibition of apoptosis that could be diagnosed, prognosed, prevented, and/or treated by polynucleotides, polypeptides, and/or agonists or antagonists of the invention, include cancers (such as follicular lymphomas, carcinomas with p53 mutations, and hormone-dependent tumors, including, but not limited to colon cancer, cardiac tumors, pancreatic cancer, melanoma, retinoblastoma, glioblastoma, lung cancer, intestinal cancer, testicular cancer, stomach cancer, neuroblastoma, myxoma, myoma, lymphoma, endothelioma, osteoblastoma, osteoclastoma, osteosarcoma, chondrosarcoma, adenoma, breast cancer, prostate cancer, Kaposi's sarcoma and ovarian cancer); autoimmune disorders such as, multiple sclerosis, Sjogren's syndrome, Hashimoto's thyroiditis, biliary cirrhosis, Behcet's disease, Crohn's disease, polymyositis, systemic lupus erythematosus and immune-related glomerulonephritis and rheumatoid arthritis) and viral infections (such as herpes viruses, pox viruses and adenoviruses), inflammation, graft v. host disease, acute graft rejection, and chronic graft rejection.

[0604] In preferred embodiments, polynucleotides, polypeptides, and/or agonists or antagonists of the invention are used to inhibit growth, progression, and/or metastasis of cancers, in particular those listed above.

[0605] Additional diseases or conditions associated with increased cell survival that could be diagnosed, prognosed, prevented, and/or treated by polynucleotides, polypeptides, and/or agonists or antagonists of the invention, include, but are not limited to, progression, and/or metastases of malignancies and related disorders such as leukemia (including acute leukemias (e.g., acute lymphocytic leukemia, acute myelocytic leukemia (including myeloblastic, promyelocytic, myelomonocytic, monocytic, and erythroleukemia)) and chronic leukemias (e.g., chronic myelocytic (granulocytic) leukemia and chronic lymphocytic leukemia)), polycythemia vera, lymphomas (e.g., Hodgkin's disease and non-Hodgkin's disease), multiple myeloma, Waldenstrom's macroglobulinemia, heavy chain disease, and solid tumors including, but not limited to, sarcomas and carcinomas such as fibrosarcoma, myxosarcoma, liposarcoma, chondrosarcoma, osteogenic sarcoma, chordoma, angiosarcoma, endotheliosarcoma, lymphangiosarcoma, lymphangioendotheliosarcoma, synovioma, mesothelioma, Ewing's tumor, leiomyosarcoma, rhabdomyosarcoma, colon carcinoma, pancreatic cancer, breast cancer, ovarian cancer, prostate cancer, squamous cell carcinoma, basal cell carcinoma, adenocarcinoma, sweat gland carcinoma, sebaceous gland carcinoma, papillary carcinoma, papillary adenocarcinomas, cystadenocarcinoma, medullary carcinoma, bronchogenic carcinoma, renal cell carcinoma, hepatoma, bile duct carcinoma, choriocarcinoma, seminoma, embryonal carcinoma, Wilm's tumor, cervical cancer, testicular tumor, lung carcinoma, small cell lung carcinoma, bladder carcinoma, epithelial carcinoma, glioma, astrocytoma, medulloblastoma, craniopharyngioma, ependymoma, pinealoma, emangioblastoma, acoustic neuroma, oligodendroglioma, menangioma, melanoma, neuroblastoma, and retinoblastoma.

[0606] Diseases associated with increased apoptosis that could be diagnosed, prognosed, prevented, and/or treated by polynucleotides, polypeptides, and/or agonists or antagonists of the invention, include AIDS; neurodegenerative disorders (such as Alzheimer's disease, Parkinson's disease, amyotrophic lateral sclerosis, retinitis pigmentosa, cerebellar degeneration and brain tumor or prior associated disease); autoimmune disorders (such as, multiple sclerosis, Sjogren's syndrome, Hashimoto's thyroiditis, biliary cirrhosis, Behcet's disease, Crohn's disease, polymyositis, systemic lupus erythematosus and immune-related glomerulonephritis and rheumatoid arthritis) myelodysplastic syndromes (such as aplastic anemia), graft v. host disease, ischemic injury (such as that caused by myocardial infarction, stroke and reperfusion injury), liver injury (e.g., hepatitis related liver injury, ischemia/reperfusion injury, cholestosis (bile duct injury) and liver cancer); toxin-induced liver disease (such as that caused by alcohol), septic shock, cachexia and anorexia.

[0607] Hyperproliferative diseases and/or disorders that could be diagnosed, prognosed, prevented, and/or treated by polynucleotides, polypeptides, and/or agonists or antagonists of the invention, include, but are not limited to, neoplasms located in the liver, abdomen, bone, breast, digestive system, pancreas, peritoneum, endocrine glands (adrenal, parathyroid, pituitary, testicles, ovary, thymus, thyroid), eye, head and neck, nervous system (central and peripheral), lymphatic system, pelvis, skin, soft tissue, spleen, thorax, and urogenital tract.

[0608] Similarly, other hyperproliferative disorders can also be diagnosed, prognosed, prevented, and/or treated by polynucleotides, polypeptides, and/or agonists or antagonists of the invention. Examples of such hyperproliferative disorders include, but are not limited to: hypergammaglobulinemia, lymphoproliferative disorders, paraproteinemias, purpura, sarcoidosis, Sezary Syndrome, Waldenstron's macroglobulinemia, Gaucher's Disease, histiocytosis, and any other hyperproliferative disease, besides neoplasia, located in an organ system listed above.

[0609] Another preferred embodiment utilizes polynucleotides of the present invention to inhibit aberrant cellular division, by gene therapy using the present invention, and/or protein fusions or fragments thereof.

[0610] Thus, the present invention provides a method for treating cell proliferative disorders by inserting into an abnormally proliferating cell a polynucleotide of the present invention, wherein said polynucleotide represses said expression.

[0611] Another embodiment of the present invention provides a method of treating cell-proliferative disorders in individuals comprising administration of one or more active gene copies of the present invention to an abnormally proliferating cell or cells. In a preferred embodiment, polynucleotides of the present invention is a DNA construct comprising a recombinant expression vector effective in expressing a DNA sequence encoding said polynucleotides. In another preferred embodiment of the present invention, the DNA construct encoding the poynucleotides of the present invention is inserted into cells to be treated utilizing a retrovirus, or more preferably an adenoviral vector (See G J. Nabel, et. al., PNAS 1999 96: 324-326, which is hereby incorporated by reference). In a most preferred embodiment, the viral vector is defective and will not transform non-proliferating cells, only proliferating cells. Moreover, in a preferred embodiment, the polynucleotides of the present invention inserted into proliferating cells either alone, or in combination with or fused to other polynucleotides, can then be modulated via an external stimulus (i.e. magnetic, specific small molecule, chemical, or drug administration, etc.), which acts upon the promoter upstream of said polynucleotides to induce expression of the encoded protein product. As such the beneficial therapeutic affect of the present invention may be expressly modulated (i.e. to increase, decrease, or inhibit expression of the present invention) based upon said external stimulus.

[0612] Polynucleotides of the present invention may be useful in repressing expression of oncogenic genes or antigens. By “repressing expression of the oncogenic genes” is intended the suppression of the transcription of the gene, the degradation of the gene transcript (pre-message RNA), the inhibition of splicing, the destruction of the messenger RNA, the prevention of the post-translational modifications of the protein, the destruction of the protein, or the inhibition of the normal function of the protein.

[0613] For local administration to abnormally proliferating cells, polynucleotides of the present invention may be administered by any method known to those of skill in the art including, but not limited to transfection, electroporation, microinjection of cells, or in vehicles such as liposomes, lipofectin, or as naked polynucleotides, or any other method described throughout the specification. The polynucleotide of the present invention may be delivered by known gene delivery systems such as, but not limited to, retroviral vectors (Gilboa, J. Virology 44:845 (1982); Hocke, Nature 320:275 (1986); Wilson, et al., Proc. Natl. Acad. Sci. U.S.A. 85:3014), vaccinia virus system (Chakrabarty et al., Mol. Cell Biol. 5:3403 (1985) or other efficient DNA delivery systems (Yates et al., Nature 313:812 (1985)) known to those skilled in the art. These references are exemplary only and are hereby incorporated by reference. In order to specifically deliver or transfect cells which are abnormally proliferating and spare non-dividing cells, it is preferable to utilize a retrovirus, or adenoviral (as described in the art and elsewhere herein) delivery system known to those of skill in the art. Since host DNA replication is required for retroviral DNA to integrate and the retrovirus will be unable to self replicate due to the lack of the retrovirus genes needed for its life cycle. Utilizing such a retroviral delivery system for polynucleotides of the present invention will target said gene and constructs to abnormally proliferating cells and will spare the non-dividing normal cells.

[0614] The polynucleotides of the present invention may be delivered directly to cell proliferative disorder/disease sites in internal organs, body cavities and the like by use of imaging devices used to guide an injecting needle directly to the disease site. The polynucleotides of the present invention may also be administered to disease sites at the time of surgical intervention.

[0615] By “cell proliferative disease” is meant any human or animal disease or disorder, affecting any one or any combination of organs, cavities, or body parts, which is characterized by single or multiple local abnormal proliferations of cells, groups of cells, or tissues, whether benign or malignant.

[0616] Any amount of the polynucleotides of the present invention may be administered as long as it has a biologically inhibiting effect on the proliferation of the treated cells. Moreover, it is possible to administer more than one of the polynucleotide of the present invention simultaneously to the same site. By “biologically inhibiting” is meant partial or total growth inhibition as well as decreases in the rate of proliferation or growth of the cells. The biologically inhibitory dose may be determined by assessing the effects of the polynucleotides of the present invention on target malignant or abnormally proliferating cell growth in tissue culture, tumor growth in animals and cell cultures, or any other method known to one of ordinary skill in the art.

[0617] The present invention is further directed to antibody-based therapies which involve administering of anti-polypeptides and anti-polynucleotide antibodies to a mammalian, preferably human, patient for treating one or more of the described disorders. Methods for producing anti-polypeptides and anti-polynucleotide antibodies polyclonal and monoclonal antibodies are described in detail elsewhere herein. Such antibodies may be provided in pharmaceutically acceptable compositions as known in the art or as described herein.

[0618] A summary of the ways in which the antibodies of the present invention may be used therapeutically includes binding polynucleotides or polypeptides of the present invention locally or systemically in the body or by direct cytotoxicity of the antibody, e.g. as mediated by complement (CDC) or by effector cells (ADCC). Some of these approaches are described in more detail below. Armed with the teachings provided herein, one of ordinary skill in the art will know how to use the antibodies of the present invention for diagnostic, monitoring or therapeutic purposes without undue experimentation.

[0619] In particular, the antibodies, fragments and derivatives of the present invention are useful for treating a subject having or developing cell proliferative and/or differentiation disorders as described herein. Such treatment comprises administering a single or multiple doses of the antibody, or a fragment, derivative, or a conjugate thereof.

[0620] The antibodies of this invention may be advantageously utilized in combination with other monoclonal or chimeric antibodies, or with lymphokines or hematopoietic growth factors, for example., which serve to increase the number or activity of effector cells which interact with the antibodies.

[0621] It is preferred to use high affinity and/or potent in vivo inhibiting and/or neutralizing antibodies against polypeptides or polynucleotides of the present invention, fragments or regions thereof, for both immunoassays directed to and therapy of disorders related to polynucleotides or polypeptides, including fragements thereof, of the present invention. Such antibodies, fragments, or regions, will preferably have an affinity for polynucleotides or polypeptides, including fragements thereof Preferred binding affinities include those with a dissociation constant or Kd less than 5×10⁻⁶M, 10⁻⁶M, 5×10⁻⁷M, 10⁻⁷M, 5×10⁻⁸ M, 10⁻⁸M, 5×10⁻⁹M, 10⁻⁹M, 5×10⁻¹⁰M, 10⁻¹⁰M, 5×10⁻¹¹M, 10⁻¹¹M, 5×10⁻¹²M, 10⁻¹²M, 5×10⁻¹³M, 10⁻¹³M, 5×10⁻¹⁴M, 10⁻¹⁴M, 5×10⁻¹⁵M, and 10⁻¹⁵M.

[0622] Moreover, polypeptides of the present invention are useful in inhibiting the angiogenesis of proliferative cells or tissues, either alone, as a protein fusion, or in combination with other polypeptides directly or indirectly, as described elsewhere herein. In a most preferred embodiment, said anti-angiogenesis effect may be achieved indirectly, for example, through the inhibition of hematopoietic, tumor-specific cells, such as tumor-associated macrophages (See Joseph I B, et al. J Natl Cancer Inst, 90(21):1648-53 (1998), which is hereby incorporated by reference). Antibodies directed to polypeptides or polynucleotides of the present invention may also result in inhibition of angiogenesis directly, or indirectly (See Witte L, et al., Cancer Metastasis Rev. 17(2):155-61 (1998), which is hereby incorporated by reference)).

[0623] Polypeptides, including protein fusions, of the present invention, or fragments thereof may be useful in inhibiting proliferative cells or tissues through the induction of apoptosis. Said polypeptides may act either directly, or indirectly to induce apoptosis of proliferative cells and tissues, for example in the activation of a death-domain receptor, such as tumor necrosis factor (TNF) receptor-1, CD95 (Fas/APO-1), TNF-receptor-related apoptosis-mediated protein (TRAMP) and TNF-related apoptosis-inducing ligand (TRAIL) receptor-1 and -2 (See Schulze-Osthoff K, et.al., Eur J Biochem 254(3):439-59 (1998), which is hereby incorporated by reference). Moreover, in another preferred embodiment of the present invention, said polypeptides may induce apoptosis through other mechanisms, such as in the activation of other proteins which will activate apoptosis, or through stimulating the expression of said proteins, either alone or in combination with small molecule drugs or adjuviants, such as apoptonin, galectins, thioredoxins, anti-inflammatory proteins (See for example, Mutat Res 400(1-2):447-55 (1998), Med Hypotheses.50(5):423-33 (1998), Chem Biol Interact. Apr 24;111-112:23-34 (1998), J Mol Med.76(6):402-12 (1998), Int J Tissue React;20(1):3-15 (1998), which are all hereby incorporated by reference).

[0624] Polypeptides, including protein fusions to, or fragments thereof, of the present invention are useful in inhibiting the metastasis of proliferative cells or tissues. Inhibition may occur as a direct result of administering polypeptides, or antibodies directed to said polypeptides as described elsewere herein, or indirectly, such as activating the expression of proteins known to inhibit metastasis, for example alpha 4,integrins, (See, e.g., Curr Top Microbiol Immunol 1998;231:125-41, which is hereby incorporated by reference). Such thereapeutic affects of the present invention may be achieved either alone, or in combination with small molecule drugs or adjuvants.

[0625] In another embodiment, the invention provides a method of delivering compositions containing the polypeptides of the invention (e.g., compositions containing polypeptides or polypeptide antibodes associated with heterologous polypeptides, heterologous nucleic acids, toxins, or prodrugs) to targeted cells expressing the polypeptide of the present invention. Polypeptides or polypeptide antibodes of the invention may be associated with with heterologous polypeptides, heterologous nucleic acids, toxins, or prodrugs via hydrophobic, hydrophilic, ionic and/or covalent interactions.

[0626] Polypeptides, protein fusions to, or fragments thereof, of the present invention are useful in enhancing the immunogenicity and/or antigenicity of proliferating cells or tissues, either directly, such as would occur if the polypeptides of the present invention ‘vaccinated’ the immune response to respond to proliferative antigens and immunogens, or indirectly, such as in activating the expression of proteins known to enhance the immune response (e.g. chemokines), to said antigens and immunogens.

[0627] Renal Disorders

[0628] Polynucleotides, polypeptides, antibodies, and/or agonists or antagonists of the present invention, may be used to treat, prevent, diagnose, and/or prognose disorders of the renal system. Renal disorders which can be diagnosed, prognosed, prevented, and/or treated with compositions of the invention include, but are not limited to, kidney failure, nephritis, blood vessel disorders of kidney, metabolic and congenital kidney disorders, urinary disorders of the kidney, autoimmune disorders, sclerosis and necrosis, electrolyte imbalance, and kidney cancers.

[0629] Kidney diseases which can be diagnosed, prognosed, prevented, and/or treated with compositions of the invention include, but are not limited to, acute kidney failure, chronic kidney failure, atheroembolic renal failure, end-stage renal disease, inflammatory diseases of the kidney (e.g., acute glomerulonephritis, postinfectious glomerulonephritis, rapidly progressive glomerulonephritis, nephrotic syndrome, membranous glomerulonephritis, familial nephrotic syndrome, membranoproliferative glomerulonephritis I and II, mesangial proliferative glomerulonephritis, chronic glomerulonephritis, acute tubulointerstitial nephritis, chronic tubulointerstitial nephritis, acute post-streptococcal glomerulonephritis (PSGN), pyelonephritis, lupus nephritis, chronic nephritis, interstitial nephritis, and post-streptococcal glomerulonephritis), blood vessel disorders of the kidneys (e.g., kidney infarction, atheroembolic kidney disease, cortical necrosis, malignant nephrosclerosis, renal vein thrombosis, renal underperfusion, renal retinopathy, renal ischemia-reperfusion, renal artery embolism, and renal artery stenosis), and kidney disorders resulting form urinary tract disease (e.g., pyelonephritis, hydronephrosis, urolithiasis (renal lithiasis, nephrolithiasis), reflux nephropathy, urinary tract infections, urinary retention, and acute or chronic unilateral obstructive uropathy.)

[0630] In addition, compositions of the invention can be used to diagnose, prognose, prevent, and/or treat metabolic and congenital disorders of the kidney (e.g., uremia, renal amyloidosis, renal osteodystrophy, renal tubular acidosis, renal glycosuria, nephrogenic diabetes insipidus, cystinuria, Fanconi's syndrome, renal fibrocystic osteosis (renal rickets), Hartnup disease, Bartter's syndrome, Liddle's syndrome, polycystic kidney disease, medullary cystic disease, medullary sponge kidney, Alport's syndrome, nail-patella syndrome, congenital nephrotic syndrome, CRUSH syndrome, horseshoe kidney, diabetic nephropathy, nephrogenic diabetes insipidus, analgesic nephropathy, kidney stones, and membranous nephropathy), and autoimmune disorders of the kidney (e.g., systemic lupus erythematosus (SLE), Goodpasture syndrome, IgA nephropathy, and IgM mesangial proliferative glomerulonephritis).

[0631] Compositions of the invention can also be used to diagnose, prognose, prevent, and/or treat sclerotic or necrotic disorders of the kidney (e.g., glomerulosclerosis, diabetic nephropathy, focal segmental glomerulosclerosis (FSGS), necrotizing glomerulonephritis, and renal papillary necrosis), cancers of the kidney (e.g., nephroma, hypemephroma, nephroblastoma, renal cell cancer, transitional cell cancer, renal adenocarcinoma, squamous cell cancer, and Wilm's tumor), and electrolyte imbalances (e.g., nephrocalcinosis, pyuria, edema, hydronephritis, proteinuria, hyponatremia, hypematremia, hypokalernia, hyperkalemia, hypocalcemia, hypercalcemia, hypophosphatemia, and hyperphosphatemia).

[0632] Polypeptides may be administered using any method known in the art, including, but not limited to, direct needle injection at the delivery site, intravenous injection, topical administration, catheter infusion, biolistic injectors, particle accelerators, gelfoam sponge depots, other commercially available depot materials, osmotic pumps, oral or suppositorial solid pharmaceutical formulations, decanting or topical applications during surgery, aerosol delivery. Such methods are known in the art. Polypeptides may be administered as part of a Therapeutic, described in more detail below. Methods of delivering polynucleotides are described in more detail herein.

[0633] Cardiovascular Disorders

[0634] Polynucleotides or polypeptides, or agonists or antagonists of the present invention, may be used to treat, prevent, diagnose, and/or prognose cardiovascular disorders, including, but not limited to, peripheral artery disease, such as limb ischemia.

[0635] Cardiovascular disorders include, but are not limited to, cardiovascular abnormalities, such as arterio-arterial fistula, arterioyenous fistula, cerebral arterioyenous malformations, congenital heart defects, pulmonary atresia, and Scimitar Syndrome. Congenital heart defects include, but are not limited to, aortic coarctation, cor triatriatum, coronary vessel anomalies, crisscross heart, dextrocardia, patent ductus arteriosus, Ebstein's anomaly, Eisenmenger complex, hypoplastic left heart syndrome, levocardia, tetralogy of fallot, transposition of great vessels, double outlet right ventricle, tricuspid atresia, persistent truncus arteriosus, and heart septal defects, such as aortopulmonary septal defect, endocardial cushion defects, Lutembacher's Syndrome, trilogy of Fallot, ventricular heart septal defects.

[0636] Cardiovascular disorders also include, but are not limited to, heart disease, such as arrhythmias, carcinoid heart disease, high cardiac output, low cardiac output, cardiac tamponade, endocarditis (including bacterial), heart aneurysm, cardiac arrest, congestive heart failure, congestive cardiomyopathy, paroxysmal dyspnea, cardiac edema, heart hypertrophy, congestive cardiomyopathy, left ventricular hypertrophy, right ventricular hypertrophy, post-infarction heart rupture, ventricular septal rupture, heart valve diseases, myocardial diseases, myocardial ischemia, pericardial effusion, pericarditis (including constrictive and tuberculous), pneumopericardium, postpericardiotomy syndrome, pulmonary heart disease, rheumatic heart disease, ventricular dysfunction, hyperemia, cardiovascular pregnancy complications, Scimitar Syndrome, cardiovascular syphilis, and cardiovascular tuberculosis.

[0637] Arrhythmias include, but are not limited to, sinus arrhythmia, atrial fibrillation, atrial flutter, bradycardia, extrasystole, Adams-Stokes Syndrome, bundle-branch block, sinoatrial block, long QT syndrome, parasystole, Lown-Ganong-Levine Syndrome, Mahaim-type pre-excitation syndrome, Wolff-Parkinson-White syndrome, sick sinus syndrome, tachycardias, and ventricular fibrillation. Tachycardias include paroxysmal tachycardia, supraventricular tachycardia, accelerated idioventricular rhythm, atrioventricular nodal reentry tachycardia, ectopic atrial tachycardia, ectopic junctional tachycardia, sinoatrial nodal reentry tachycardia, sinus tachycardia, Torsades de Pointes, and ventricular tachycardia.

[0638] Heart valve diseases include, but are not limited to, aortic valve insufficiency, aortic valve stenosis, hear murmurs, aortic valve prolapse, mitral valve prolapse, tricuspid valve prolapse, mitral valve insufficiency, mitral valve stenosis, pulmonary atresia, pulmonary valve insufficiency, pulmonary valve stenosis, tricuspid atresia, tricuspid valve insufficiency, and tricuspid valve stenosis.

[0639] Myocardial diseases include, but are not limited to, alcoholic cardiomyopathy, congestive cardiomyopathy, hypertrophic cardiomyopathy, aortic subvalvular stenosis, pulmonary subvalvular stenosis, restrictive cardiomyopathy, Chagas cardiomyopathy, endocardial fibroelastosis, endomyocardial fibrosis, Kearns Syndrome, myocardial reperfusion injury, and myocarditis.

[0640] Myocardial ischemias include, but are not limited to, coronary disease, such as angina pectoris, coronary aneurysm, coronary arteriosclerosis, coronary thrombosis, coronary vasospasm, myocardial infarction and myocardial stunning.

[0641] Cardiovascular diseases also include vascular diseases such as aneurysms, angiodysplasia, angiomatosis, bacillary angiomatosis, Hippel-Lindau Disease, Klippel-Trenaunay-Weber Syndrome, Sturge-Weber Syndrome, angioneurotic edema, aortic diseases, Takayasu's Arteritis, aortitis, Leriche's Syndrome, arterial occlusive diseases, arteritis, enarteritis, polyarteritis nodosa, cerebrovascular disorders, diabetic angiopathies, diabetic retinopathy, embolisms, thrombosis, erythromelalgia, hemorrhoids, hepatic veno-occlusive disease, hypertension, hypotension, ischemia, peripheral vascular diseases, phlebitis, pulmonary veno-occlusive disease, Raynaud's disease, CREST syndrome, retinal vein occlusion, Scimitar syndrome, superior vena cava syndrome, telangiectasia, atacia telangiectasia, hereditary hemorrhagic telangiectasia, varicocele, varicose veins, varicose ulcer, vasculitis, and venous insufficiency.

[0642] Aneurysms include, but are not limited to, dissecting aneurysms, false aneurysms, infected aneurysms, ruptured aneurysms, aortic aneurysms, cerebral aneurysms, coronary aneurysms, heart aneurysms, and iliac aneurysms.

[0643] Arterial occlusive diseases include, but are not limited to, arteriosclerosis, intermittent claudication, carotid stenosis, fibromuscular dysplasias, mesenteric vascular occlusion, Moyamoya disease, renal artery obstruction, retinal artery occlusion, and thromboangiitis obliterans.

[0644] Cerebrovascular disorders include, but are not limited to, carotid artery diseases, cerebral amyloid angiopathy, cerebral aneurysm, cerebral anoxia, cerebral arteriosclerosis, cerebral arterioyenous malformation, cerebral artery diseases, cerebral embolism and thrombosis, carotid artery thrombosis, sinus thrombosis, Wallenberg's syndrome, cerebral hemorrhage, epidural hematoma, subdural hematoma, subaraxhnoid hemorrhage, cerebral infarction, cerebral ischemia (including transient), subclavian steal syndrome, periventricular leukomalacia, vascular headache, cluster headache, migraine, and vertebrobasilar insufficiency.

[0645] Embolisms include, but are not limited to, air embolisms, amniotic fluid embolisms, cholesterol embolisms, blue toe syndrome, fat embolisms, pulmonary embolisms, and thromoboembolisms. Thrombosis include, but are not limited to, coronary thrombosis, hepatic vein thrombosis, retinal vein occlusion, carotid artery thrombosis, sinus thrombosis, Wallenberg's syndrome, and thrombophlebitis.

[0646] Ischemic disorders include, but are not limited to, cerebral ischemia, ischemic colitis, compartment syndromes, anterior compartment syndrome, myocardial ischemia, reperfusion injuries, and peripheral limb ischemia. Vasculitis includes, but is not limited to, aortitis, arteritis, Behcet's Syndrome, Churg-Strauss Syndrome, mucocutaneous lymph node syndrome, thromboangiitis obliterans, hypersensitivity vasculitis, Schoenlein-Henoch purpura, allergic cutaneous vasculitis, and Wegener's granulomatosis.

[0647] Polypeptides may be administered using any method known in the art, including, but not limited to, direct needle injection at the delivery site, intravenous injection, topical administration, catheter infusion, biolistic injectors, particle accelerators, gelfoam sponge depots, other commercially available depot materials, osmotic pumps, oral or suppositorial solid pharmaceutical formulations, decanting or topical applications during surgery, aerosol delivery. Such methods are known in the art. Polypeptides may be administered as part of a Therapeutic, described in more detail below. Methods of delivering polynucleotides are described in more detail herein.

[0648] Respiratory Disorders

[0649] Polynucleotides or polypeptides, or agonists or antagonists of the present invention may be used to treat, prevent, diagnose, and/or prognose diseases and/or disorders of the respiratory system.

[0650] Diseases and disorders of the respiratory system include, but are not limited to, nasal vestibulitis, nonallergic rhinitis (e.g., acute rhinitis, chronic rhinitis, atrophic rhinitis, vasomotor rhinitis), nasal polyps, and sinusitis, juvenile angiofibromas, cancer of the nose and juvenile papillomas, vocal cord polyps, nodules (singer's nodules), contact ulcers, vocal cord paralysis, laryngoceles, pharyngitis (e.g., viral and bacterial), tonsillitis, tonsillar cellulitis, parapharyngeal abscess, laryngitis, laryngoceles, and throat cancers (e.g., cancer of the nasopharynx, tonsil cancer, larynx cancer), lung cancer (e.g., squamous cell carcinoma, small cell (oat cell) carcinoma, large cell carcinoma, and adenocarcinoma), allergic disorders (eosinophilic pneumonia, hypersensitivity pneumonitis (e.g., extrinsic allergic alveolitis, allergic interstitial pneumonitis, organic dust pneumoconiosis, allergic bronchopulmonary aspergillosis, asthma, Wegener's granulomatosis (granulomatous vasculitis), Goodpasture's syndrome)), pneumonia (e.g., bacterial pneumonia (e.g., Streptococcus pneumoniae (pneumoncoccal pneumonia), Staphylococcus aureus (staphylococcal pneumonia), Gram-negative bacterial pneumonia (caused by, e.g., Klebsiella and Pseudomas spp.), Mycoplasma pneumoniae pneumonia, Hemophilus influenzae pneumonia, Legionella pneumophila (Legionnaires' disease), and Chlamydia psittaci (Psittacosis)), and viral pneumonia (e.g., influenza, chickenpox (varicella).

[0651] Additional diseases and disorders of the respiratory system include, but are not limited to bronchiolitis, polio (poliomyelitis), croup, respiratory syncytial viral infection, mumps, erythema infectiosum (fifth disease), roseola infantum, progressive rubella panencephalitis, german measles, and subacute sclerosing panencephalitis), fungal pneumonia (e.g., Histoplasmosis, Coccidioidomycosis, Blastomycosis, fungal infections in people with severely suppressed immune systems (e.g., cryptococcosis, caused by Cryptococcus neoformans; aspergillosis, caused by Aspergillus spp.; candidiasis, caused by Candida; and mucormycosis)), Pneumocystis carinii (pneumocystis pneumonia), a typical pneumonias (e.g., Mycoplasma and Chlamydia spp.), opportunistic infection pneumonia, nosocomial pneumonia, chemical pneumonitis, and aspiration pneumonia, pleural disorders (e.g., pleurisy, pleural effusion, and pneumothorax (e.g., simple spontaneous pneumothorax, complicated spontaneous pneumothorax, tension pneumothorax)), obstructive airway diseases (e.g., asthma, chronic obstructive pulmonary disease (COPD), emphysema, chronic or acute bronchitis), occupational lung diseases (e.g., silicosis, black lung (coal workers' pneumoconiosis), asbestosis, berylliosis, occupational asthsma, byssinosis, and benign pneumoconioses), Infiltrative Lung Disease (e.g., pulmonary fibrosis (e.g., fibrosing alveolitis, usual interstitial pneumonia), idiopathic pulmonary fibrosis, desquamative interstitial pneumonia, lymphoid interstitial pneumonia, histiocytosis X (e.g., Letterer-Siwe disease, Hand-Schüller-Christian disease, eosinophilic granuloma), idiopathic pulmonary hemosiderosis, sarcoidosis and pulmonary alveolar proteinosis), Acute respiratory distress syndrome (also called, e.g., adult respiratory distress syndrome), edema, pulmonary embolism, bronchitis (e.g., viral, bacterial), bronchiectasis, atelectasis, lung abscess (caused by, e.g., Staphylococcus aureus or Legionella pneumophila), and cystic fibrosis.

[0652] Anti-Angiogenesis Activity

[0653] The naturally occurring balance between endogenous stimulators and inhibitors of angiogenesis is one in which inhibitory influences predominate. Rastinejad et al., Cell 56:345-355 (1989). In those rare instances in which neovascularization occurs under normal physiological conditions, such as wound healing, organ regeneration, embryonic development, and female reproductive processes, angiogenesis is stringently regulated and spatially and temporally delimited. Under conditions of pathological angiogenesis such as that characterizing solid tumor growth, these regulatory controls fail. Unregulated angiogenesis becomes pathologic and sustains progression of many neoplastic and non-neoplastic diseases. A number of serious diseases are dominated by abnormal neovascularization including solid tumor growth and metastases, arthritis, some types of eye disorders, and psoriasis. See, e.g., reviews by Moses et al., Biotech. 9:630-634 (1991); Folkman et al., N. Engl. J. Med., 333:1757-1763 (1995); Auerbach et al., J Microvasc. Res. 29:401-411 (1985); Folkman, Advances in Cancer Research, eds. Klein and Weinhouse, Academic Press, New York, pp. 175-203 (1985); Patz, Am. J. Opthalmol. 94:715-743 (1982); and Folkman et al., Science 221:719-725 (1983). In a number of pathological conditions, the process of angiogenesis contributes to the disease state. For example, significant data have accumulated which suggest that the growth of solid tumors is dependent on angiogenesis. Folkman and Klagsbrun, Science 235:442-447 (1987).

[0654] The present invention provides for treatment of diseases or disorders associated with neovascularization by administration of the polynucleotides and/or polypeptides of the invention, as well as agonists or antagonists of the present invention. Malignant and metastatic conditions which can be treated with the polynucleotides and polypeptides, or agonists or antagonists of the invention include, but are not limited to, malignancies, solid tumors, and cancers described herein and otherwise known in the art (for a review of such disorders, see Fishman et al., Medicine, 2d Ed., J. B. Lippincott Co., Philadelphia (1985)). Thus, the present invention provides a method of treating an angiogenesis-related disease and/or disorder, comprising administering to an individual in need thereof a therapeutically effective amount of a polynucleotide, polypeptide, antagonist and/or agonist of the invention. For example, polynucleotides, polypeptides, antagonists and/or agonists may be utilized in a variety of additional methods in order to therapeutically treat a cancer or tumor. Cancers which may be treated with polynucleotides, polypeptides, antagonists and/or agonists include, but are not limited to solid tumors, including prostate, lung, breast, ovarian, stomach, pancreas, larynx, esophagus, testes, liver, parotid, biliary tract, colon, rectum, cervix, uterus, endometrium, kidney, bladder, thyroid cancer; primary tumors and metastases; melanomas; glioblastoma; Kaposi's sarcoma; leiomyosarcoma; non-small cell lung cancer; colorectal cancer; advanced malignancies; and blood born tumors such as leukemias. For example, polynucleotides, polypeptides, antagonists and/or agonists may be delivered topically, in order to treat cancers such as skin cancer, head and neck tumors, breast tumors, and Kaposi's sarcoma.

[0655] Within yet other aspects, polynucleotides, polypeptides, antagonists and/or agonists may be utilized to treat superficial forms of bladder cancer by, for example, intravesical administration. Polynucleotides, polypeptides, antagonists and/or agonists may be delivered directly into the tumor, or near the tumor site, via injection or a catheter. Of course, as the artisan of ordinary skill will appreciate, the appropriate mode of administration will vary according to the cancer to be treated. Other modes of delivery are discussed herein.

[0656] Polynucleotides, polypeptides, antagonists and/or agonists may be useful in treating other disorders, besides cancers, which involve angiogenesis. These disorders include, but are not limited to: benign tumors, for example hemangiomas, acoustic neuromas, neurofibromas, trachomas, and pyogenic granulomas; artheroscleric plaques; ocular angiogenic diseases, for example, diabetic retinopathy, retinopathy of prematurity, macular degeneration, corneal graft rejection, neovascular glaucoma, retrolental fibroplasia, rubeosis, retinoblastoma, uvietis and Pterygia (abnormal blood vessel growth) of the eye; rheumatoid arthritis; psoriasis; delayed wound healing; endometriosis; vasculogenesis; granulations; hypertrophic scars (keloids); nonunion fractures; scleroderma; trachoma; vascular adhesions; myocardial angiogenesis; coronary collaterals; cerebral collaterals; arterioyenous malformations; ischemic limb angiogenesis; Osler-Webber Syndrome; plaque neovascularization; telangiectasia; hemophiliac joints; angiofibroma; fibromuscular dysplasia; wound granulation; Crohn's disease; and atherosclerosis.

[0657] For example, within one aspect of the present invention methods are provided for treating hypertrophic scars and keloids, comprising the step of administering a polynucleotide, polypeptide, antagonist and/or agonist of the invention to a hypertrophic scar or keloid.

[0658] Within one embodiment of the present invention polynucleotides, polypeptides, antagonists and/or agonists of the invention are directly injected into a hypertrophic scar or keloid, in order to prevent the progression of these lesions. This therapy is of particular value in the prophylactic treatment of conditions which are known to result in the development of hypertrophic scars and keloids (e.g., bums), and is preferably initiated after the proliferative phase has had time to progress (approximately 14 days after the initial injury), but before hypertrophic scar or keloid development. As noted above, the present invention also provides methods for treating neovascular diseases of the eye, including for example, comeal neovascularization, neovascular glaucoma, proliferative diabetic retinopathy, retrolental fibroplasia and macular degeneration.

[0659] Moreover, Ocular disorders associated with neovascularization which can be treated with the polynucleotides and polypeptides of the present invention (including agonists and/or antagonists) include, but are not limited to: neovascular glaucoma, diabetic retinopathy, retinoblastoma, retrolental fibroplasia, uveitis, retinopathy of prematurity macular degeneration, comeal graft neovascularization, as well as other eye inflammatory diseases, ocular tumors and diseases associated with choroidal or iris neovascularization. See, e.g., reviews by Waltman et al., Am. J. Ophthal. 85:704-710 (1978) and Gartner et al, Surv. Ophthal. 22:291-312 (1978).

[0660] Thus, within one aspect of the present invention methods are provided for treating neovascular diseases of the eye such as corneal neovascularization (including corneal graft neovascularization), comprising the step of administering to a patient a therapeutically effective amount of a compound (as described above) to the cornea, such that the formation of blood vessels is inhibited. Briefly, the cornea is a tissue which normally lacks blood vessels. In certain pathological conditions however, capillaries may extend into the cornea from the pericorneal vascular plexus of the limbus. When the cornea becomes vascularized, it also becomes clouded, resulting in a decline in the patient's visual acuity. Visual loss may become complete if the cornea completely opacitates. A wide variety of disorders can result in corneal neovascularization, including for example, corneal infections (e.g., trachoma, herpes simplex keratitis, leishmaniasis and onchocerciasis), immunological processes (e.g., graft rejection and Stevens-Johnson's syndrome), alkali bums, trauma, inflammation (of any cause), toxic and nutritional deficiency states, and as a complication of wearing contact lenses.

[0661] Within particularly preferred embodiments of the invention, may be prepared for topical administration in saline (combined with any of the preservatives and antimicrobial agents commonly used in ocular preparations), and administered in eyedrop form. The solution or suspension may be prepared in its pure form and administered several times daily. Alternatively, anti-angiogenic compositions, prepared as described above, may also be administered directly to the cornea. Within preferred embodiments, the anti-angiogenic composition is prepared with a muco-adhesive polymer which binds to cornea. Within further embodiments, the anti-angiogenic factors or anti-angiogenic compositions may be utilized as an adjunct to conventional steroid therapy. Topical therapy may also be useful prophylactically in corneal lesions which are known to have a high probability of inducing an angiogenic response (such as chemical burns). In these instances the treatment, likely in combination with steroids, may be instituted immediately to help prevent subsequent complications.

[0662] Within other embodiments, the compounds described above may be injected directly into the corneal stroma by an ophthalmologist under microscopic guidance. The preferred site of injection may vary with the morphology of the individual lesion, but the goal of the administration would be to place the composition at the advancing front of the vasculature (i.e., interspersed between the blood vessels and the normal cornea). In most cases this would involve perilimbic corneal injection to “protect” the cornea from the advancing blood vessels. This method may also be utilized shortly after a corneal insult in order to prophylactically prevent corneal neovascularization. In this situation the material could be injected in the perilimbic cornea interspersed between the corneal lesion and its undesired potential limbic blood supply. Such methods may also be utilized in a similar fashion to prevent capillary invasion of transplanted corneas. In a sustained-release form injections might only be required 2-3 times per year. A steroid could also be added to the injection solution to reduce inflammation resulting from the injection itself.

[0663] Within another aspect of the present invention, methods are provided for treating neovascular glaucoma, comprising the step of administering to a patient a therapeutically effective amount of a polynucleotide, polypeptide, antagonist and/or agonist to the eye, such that the formation of blood vessels is inhibited. In one embodiment, the compound may be administered topically to the eye in order to treat early forms of neovascular glaucoma. Within other embodiments, the compound may be implanted by injection into the region of the anterior chamber angle. Within other embodiments, the compound may also be placed in any location such that the compound is continuously released into the aqueous humor. Within another aspect of the present invention, methods are provided for treating proliferative diabetic retinopathy, comprising the step of administering to a patient a therapeutically effective amount of a polynucleotide, polypeptide, antagonist and/or agonist to the eyes, such that the formation of blood vessels is inhibited.

[0664] Within particularly preferred embodiments of the invention, proliferative diabetic retinopathy may be treated by injection into the aqueous humor or the vitreous, in order to increase the local concentration of the polynucleotide, polypeptide, antagonist and/or agonist in the retina. Preferably, this treatment should be initiated prior to the acquisition of severe disease requiring photocoagulation.

[0665] Within another aspect of the present invention, methods are provided for treating retrolental fibroplasia, comprising the step of administering to a patient a therapeutically effective amount of a polynucleotide, polypeptide, antagonist and/or agonist to the eye, such that the formation of blood vessels is inhibited. The compound may be administered topically, via intravitreous injection and/or via intraocular implants.

[0666] Additionally, disorders which can be treated with the polynucleotides, polypeptides, agonists and/or agonists include, but are not limited to, hemangioma, arthritis, psoriasis, angiofibroma, atherosclerotic plaques, delayed wound healing, granulations, hemophilic joints, hypertrophic scars, nonunion fractures, Osler-Weber syndrome, pyogenic granuloma, scleroderma, trachoma, and vascular adhesions.

[0667] Moreover, disorders and/or states, which can be treated, prevented, diagnosed, and/or prognosed with the the polynucleotides, polypeptides, agonists and/or agonists of the invention include, but are not limited to, solid tumors, blood born tumors such as leukemias, tumor metastasis, Kaposi's sarcoma, benign tumors, for example hemangiomas, acoustic neuromas, neurofibromas, trachomas, and pyogenic granulomas, rheumatoid arthritis, psoriasis, ocular angiogenic diseases, for example, diabetic retinopathy, retinopathy of prematurity, macular degeneration, corneal graft rejection, neovascular glaucoma, retrolental fibroplasia, rubeosis, retinoblastoma, and uvietis, delayed wound healing, endometriosis, vascluogenesis, granulations, hypertrophic scars (keloids), nonunion fractures, scleroderma, trachoma, vascular adhesions, myocardial angiogenesis, coronary collaterals, cerebral collaterals, arterioyenous malformations, ischemic limb angiogenesis, Osler-Webber Syndrome, plaque neovascularization, telangiectasia, hemophiliac joints, angiofibroma fibromuscular dysplasia, wound granulation, Crohn's disease, atherosclerosis, birth control agent by preventing vascularization required for embryo implantation controlling menstruation, diseases that have angiogenesis as a pathologic consequence such as cat scratch disease (Rochele minalia quintosa), ulcers (Helicobacter pylori), Bartonellosis and bacillary angiomatosis.

[0668] In one aspect of the birth control method, an amount of the compound sufficient to block embryo implantation is administered before or after intercourse and fertilization have occurred, thus providing an effective method of birth control, possibly a “morning after” method. Polynucleotides, polypeptides, agonists and/or agonists may also be used in controlling menstruation or administered as either a peritoneal lavage fluid or for peritoneal implantation in the treatment of endometriosis.

[0669] Polynucleotides, polypeptides, agonists and/or agonists of the present invention may be incorporated into surgical sutures in order to prevent stitch granulomas.

[0670] Polynucleotides, polypeptides, agonists and/or agonists may be utilized in a wide variety of surgical procedures. For example, within one aspect of the present invention a compositions (in the form of, for example, a spray or film) may be utilized to coat or spray an area prior to removal of a tumor, in order to isolate normal surrounding tissues from malignant tissue, and/or to prevent the spread of disease to surrounding tissues. Within other aspects of the present invention, compositions (e.g., in the form of a spray) may be delivered via endoscopic procedures in order to coat tumors, or inhibit angiogenesis in a desired locale. Within yet other aspects of the present invention, surgical meshes which have been coated with anti-angiogenic compositions of the present invention may be utilized in any procedure wherein a surgical mesh might be utilized. For example, within one embodiment of the invention a surgical mesh laden with an anti-angiogenic composition may be utilized during abdominal cancer resection surgery (e.g., subsequent to colon resection) in order to provide support to the structure, and to release an amount of the anti-angiogenic factor.

[0671] Within further aspects of the present invention, methods are provided for treating tumor excision sites, comprising administering a polynucleotide, polypeptide, agonist and/or agonist to the resection margins of a tumor subsequent to excision, such that the local recurrence of cancer and the formation of new blood vessels at the site is inhibited. Within one embodiment of the invention, the anti-angiogenic compound is administered directly to the tumor excision site (e.g., applied by swabbing, brushing or otherwise coating the resection margins of the tumor with the anti-angiogenic compound). Alternatively, the anti-angiogenic compounds may be incorporated into known surgical pastes prior to administration. Within particularly preferred embodiments of the invention, the anti-angiogenic compounds are applied after hepatic resections for malignancy, and after neurosurgical operations.

[0672] Within one aspect of the present invention, polynucleotides, polypeptides, agonists and/or agonists may be administered to the resection margin of a wide variety of tumors, including for example, breast, colon, brain and hepatic tumors. For example, within one embodiment of the invention, anti-angiogenic compounds may be administered to the site of a neurological tumor subsequent to excision, such that the formation of new blood vessels at the site are inhibited.

[0673] The polynucleotides, polypeptides, agonists and/or agonists of the present invention may also be administered along with other anti-angiogenic factors. Representative examples of other anti-angiogenic factors include: Anti-Invasive Factor, retinoic acid and derivatives thereof, paclitaxel, Suramin, Tissue Inhibitor of Metalloproteinase-1, Tissue Inhibitor of Metalloproteinase-2, Plasminogen Activator Inhibitor-1, Plasminogen Activator Inhibitor-2, and various forms of the lighter “d group” transition metals.

[0674] Lighter “d group” transition metals include, for example, vanadium, molybdenum, tungsten, titanium, niobium, and tantalum species. Such transition metal species may form transition metal complexes. Suitable complexes of the above-mentioned transition metal species include oxo transition metal complexes.

[0675] Representative examples of vanadium complexes include oxo vanadium complexes such as vanadate and vanadyl complexes. Suitable vanadate complexes include metavanadate and orthovanadate complexes such as, for example, ammonium metavanadate, sodium metavanadate, and sodium orthovanadate. Suitable vanadyl complexes include, for example, vanadyl acetylacetonate and vanadyl sulfate including vanadyl sulfate hydrates such as vanadyl sulfate mono- and trihydrates.

[0676] Representative examples of tungsten and molybdenum complexes also include oxo complexes. Suitable oxo tungsten complexes include tungstate and tungsten oxide complexes. Suitable tungstate complexes include ammonium tungstate, calcium tungstate, sodium tungstate dihydrate, and tungstic acid. Suitable tungsten oxides include tungsten (IV) oxide and tungsten (VI) oxide. Suitable oxo molybdenum complexes include molybdate, molybdenum oxide, and molybdenyl complexes. Suitable molybdate complexes include ammonium molybdate and its hydrates, sodium molybdate and its hydrates, and potassium molybdate and its hydrates. Suitable molybdenum oxides include molybdenum (VI) oxide, molybdenum (VI) oxide, and molybdic acid. Suitable molybdenyl complexes include, for example, molybdenyl acetylacetonate. Other suitable tungsten and molybdenum complexes include hydroxo derivatives derived from, for example, glycerol, tartaric acid, and sugars.

[0677] A wide variety of other anti-angiogenic factors may also be utilized within the context of the present invention. Representative examples include platelet factor 4; protamine sulphate; sulphated chitin derivatives (prepared from queen crab shells), (Murata et al., Cancer Res. 51:22-26, 1991); Sulphated Polysaccharide Peptidoglycan Complex (SP-PG) (the function of this compound may be enhanced by the presence of steroids such as estrogen, and tamoxifen citrate); Staurosporine; modulators of matrix metabolism, including for example, proline analogs, cishydroxyproline, d,L-3,4-dehydroproline, Thiaproline, alpha,alpha-dipyridyl, aminopropionitrile fumarate; 4-propyl-5-(4-pyridinyl)-2(3H)-oxazolone; Methotrexate; Mitoxantrone; Heparin; Interferons; 2 Macroglobulin-serum; ChIMP-3 (Pavloff et al., J. Bio. Chem. 267:17321-17326, 1992); Chymostatin (Tomkinson et al., Biochem J. 286:475-480, 1992); Cyclodextrin Tetradecasulfate; Eponemycin; Camptothecin; Fumagillin (Ingber et al., Nature 348:555-557, 1990); Gold Sodium Thiomalate (“GST”; Matsubara and Ziff, J. Clin. Invest. 79:1440-1446, 1987); anticollagenase-serum; alpha2-antiplasmin (Holmes et al., J. Biol. Chem. 262(4):1659-1664, 1987); Bisantrene (National Cancer Institute); Lobenzarit disodium (N-(2)-carboxyphenyl-4-chloroanthronilic acid disodium or “CCA”; Takeuchi et al., Agents Actions 36:312-316, 1992); Thalidomide; Angostatic steroid; AGM-1470; carboxynaminolmidazole; and metalloproteinase inhibitors such as BB94.

[0678] Diseases at the Cellular Level

[0679] Diseases associated with increased cell survival or the inhibition of apoptosis that could be treated, prevented, diagnosed, and/or prognosed using polynucleotides or polypeptides, as well as antagonists or agonists of the present invention, include cancers (such as follicular lymphomas, carcinomas with p53 mutations, and hormone-dependent tumors, including, but not limited to colon cancer, cardiac tumors, pancreatic cancer, melanoma, retinoblastoma, glioblastoma, lung cancer, intestinal cancer, testicular cancer, stomach cancer, neuroblastoma, myxoma, myoma, lymphoma, endothelioma, osteoblastoma, osteoclastoma, osteosarcoma, chondrosarcoma, adenoma, breast cancer, prostate cancer, Kaposi's sarcoma and ovarian cancer); autoimmune disorders (such as, multiple sclerosis, Sjogren's syndrome, Hashimoto's thyroiditis, biliary cirrhosis, Behcet's disease, Crohn's disease, polymyositis, systemic lupus erythematosus and immune-related glomerulonephritis and rheumatoid arthritis) and viral infections (such as herpes viruses, pox viruses and adenoviruses), inflammation, graft v. host disease, acute graft rejection, and chronic graft rejection.

[0680] In preferred embodiments, polynucleotides, polypeptides, and/or antagonists of the invention are used to inhibit growth, progression, and/or metasis of cancers, in particular those listed above.

[0681] Additional diseases or conditions associated with increased cell survival that could be treated or detected by polynucleotides or polypeptides, or agonists or antagonists of the present invention include, but are not limited to, progression, and/or metastases of malignancies and related disorders such as leukemia (including acute leukemias (e.g., acute lymphocytic leukemia, acute myelocytic leukemia (including myeloblastic, promyelocytic, myelomonocytic, monocytic, and erythroleukemia)) and chronic leukemias (e.g., chronic myelocytic (granulocytic) leukemia and chronic lymphocytic leukemia)), polycythemia vera, lymphomas (e.g., Hodgkin's disease and non-Hodgkin's disease), multiple myeloma, Waldenstrom's macroglobulinemia, heavy chain disease, and solid tumors including, but not limited to, sarcomas and carcinomas such as fibrosarcoma, myxosarcoma, liposarcoma, chondrosarcoma, osteogenic sarcoma, chordoma, angiosarcoma, endotheliosarcoma, lymphangiosarcoma, lymphangioendotheliosarcoma, synovioma, mesothelioma, Ewing's tumor, leiomyosarcoma, rhabdomyosarcoma, colon carcinoma, pancreatic cancer, breast cancer, ovarian cancer, prostate cancer, squamous cell carcinoma, basal cell carcinoma, adenocarcinoma, sweat gland carcinoma, sebaceous gland carcinoma, papillary carcinoma, papillary adenocarcinomas, cystadenocarcinoma, medullary carcinoma, bronchogenic carcinoma, renal cell carcinoma, hepatoma, bile duct carcinoma, choriocarcinoma, seminoma, embryonal carcinoma, Wilm's tumor, cervical cancer, testicular tumor, lung carcinoma, small cell lung carcinoma, bladder carcinoma, epithelial carcinoma, glioma, astrocytoma, medulloblastoma, craniopharyngioma, ependymoma, pinealoma, hemangioblastoma, acoustic neuroma, oligodendroglioma, menangioma, melanoma, neuroblastoma, and retinoblastoma.

[0682] Diseases associated with increased apoptosis that could be treated, prevented, diagnosed, and/or prognesed using polynucleotides or polypeptides, as well as agonists or antagonists of the present invention, include, but are not limited to, AIDS; neurodegenerative disorders (such as Alzheimer's disease, Parkinson's disease, Amyotrophic lateral sclerosis, Retinitis pigmentosa, Cerebellar degeneration and brain tumor or prior associated disease); autoimmune disorders (such as, multiple sclerosis, Sjogren's syndrome, Hashimoto's thyroiditis, biliary cirrhosis, Behcet's disease, Crohn's disease, polymyositis, systemic lupus erythematosus and immune-related glomerulonephritis and rheumatoid arthritis) myelodysplastic syndromes (such as aplastic anemia), graft v. host disease, ischemic injury (such as that caused by myocardial infarction, stroke and reperfusion injury), liver injury (e.g., hepatitis related liver injury, ischemia/reperfusion injury, cholestosis (bile duct injury) and liver cancer); toxin-induced liver disease (such as that caused by alcohol), septic shock, cachexia and anorexia.

[0683] Wound Healing and Epithelial Cell Proliferation

[0684] In accordance with yet a further aspect of the present invention, there is provided a process for utilizing polynucleotides or polypeptides, as well as agonists or antagonists of the present invention, for therapeutic purposes, for example, to stimulate epithelial cell proliferation and basal keratinocytes for the purpose of wound healing, and to stimulate hair follicle production and healing of dermal wounds. Polynucleotides or polypeptides, as well as agonists or antagonists of the present invention, may be clinically useful in stimulating wound healing including surgical wounds, excisional wounds, deep wounds involving damage of the dermis and epidermis, eye tissue wounds, dental tissue wounds, oral cavity wounds, diabetic ulcers, dermal ulcers, cubitus ulcers, arterial ulcers, venous stasis ulcers, burns resulting from heat exposure or chemicals, and other abnormal wound healing conditions such as uremia, malnutrition, vitamin deficiencies and complications associated with systemic treatment with steroids, radiation therapy and antineoplastic drugs and antimetabolites. Polynucleotides or polypeptides, as well as agonists or antagonists of the present invention, could be used to promote dermal reestablishment subsequent to dermal loss

[0685] Polynucleotides or polypeptides, as well as agonists or antagonists of the present invention, could be used to increase the adherence of skin grafts to a wound bed and to stimulate re-epithelialization from the wound bed. The following are types of grafts that polynucleotides or polypeptides, agonists or antagonists of the present invention, could be used to increase adherence to a wound bed: autografts, artificial skin, allografts, autodermic graft, autoepdermic grafts, avacular grafts, Blair-Brown grafts, bone graft, brephoplastic grafts, cutis graft, delayed graft, dermic graft, epidermic graft, fascia graft, full thickness graft, heterologous graft, xenograft, homologous graft, hyperplastic graft, lamellar graft, mesh graft, mucosal graft, Ollier-Thiersch graft, omenpal graft, patch graft, pedicle graft, penetrating graft, split skin graft, thick split graft. Polynucleotides or polypeptides, as well as agonists or antagonists of the present invention, can be used to promote skin strength and to improve the appearance of aged skin.

[0686] It is believed that polynucleotides or polypeptides, as well as agonists or antagonists of the present invention, will also produce changes in hepatocyte proliferation, and epithelial cell proliferation in the lung, breast, pancreas, stomach, small intestine, and large intestine. Polynucleotides or polypeptides, as well as agonists or antagonists of the present invention, could promote proliferation of epithelial cells such as sebocytes, hair follicles, hepatocytes, type II pneumocytes, mucin-producing goblet cells, and other epithelial cells and their progenitors contained within the skin, lung, liver, and gastrointestinal tract. Polynucleotides or polypeptides, agonists or antagonists of the present invention, may promote proliferation of endothelial cells, keratinocytes, and basal keratinocytes.

[0687] Polynucleotides or polypeptides, as well as agonists or antagonists of the present invention, could also be used to reduce the side effects of gut toxicity that result from radiation, chemotherapy treatments or viral infections. Polynucleotides or polypeptides, as well as agonists or antagonists of the present invention, may have a cytoprotective effect on the small intestine mucosa. Polynucleotides or polypeptides, as well as agonists or antagonists of the present invention, may also stimulate healing of mucositis (mouth ulcers) that result from chemotherapy and viral infections.

[0688] Polynucleotides or polypeptides, as well as agonists or antagonists of the present invention, could further be used in full regeneration of skin in full and partial thickness skin defects, including burns, (i.e., repopulation of hair follicles, sweat glands, and sebaceous glands), treatment of other skin defects such as psoriasis. Polynucleotides or polypeptides, as well as agonists or antagonists of the present invention, could be used to treat epidermolysis bullosa, a defect in adherence of the epidermis to the underlying dermis which results in frequent, open and painful blisters by accelerating reepithelialization of these lesions. Polynucleotides or polypeptides, as well as agonists or antagonists of the present invention, could also be used to treat gastric and doudenal ulcers and help heal by scar formation of the mucosal lining and regeneration of glandular mucosa and duodenal mucosal lining more rapidly. Inflammatory bowel diseases, such as Crohn's disease and ulcerative colitis, are diseases which result in destruction of the mucosal surface of the small or large intestine, respectively. Thus, polynucleotides or polypeptides, as well as agonists or antagonists of the present invention, could be used to promote the resurfacing of the mucosal surface to aid more rapid healing and to prevent progression of inflammatory bowel disease. Treatment with polynucleotides or polypeptides, agonists or antagonists of the present invention, is expected to have a significant effect on the production of mucus throughout the gastrointestinal tract and could be used to protect the intestinal mucosa from injurious substances that are ingested or following surgery. Polynucleotides or polypeptides, as well as agonists or antagonists of the present invention, could be used to treat diseases associate with the under expression.

[0689] Moreover, polynucleotides or polypeptides, as well as agonists or antagonists of the present invention, could be used to prevent and heal damage to the lungs due to various pathological states. Polynucleotides or polypeptides, as well as agonists or antagonists of the present invention, which could stimulate proliferation and differentiation and promote the repair of alveoli and brochiolar epithelium to prevent or treat acute or chronic lung damage. For example, emphysema, which results in the progressive loss of aveoli, and inhalation injuries, i.e., resulting from smoke inhalation and burns, that cause necrosis of the bronchiolar epithelium and alveoli could be effectively treated using polynucleotides or polypeptides, agonists or antagonists of the present invention. Also, polynucleotides or polypeptides, as well as agonists or antagonists of the present invention, could be used to stimulate the proliferation of and differentiation of type II pneumocytes, which may help treat or prevent disease such as hyaline membrane diseases, such as infant respiratory distress syndrome and bronchopulmonary displasia, in premature infants.

[0690] Polynucleotides or polypeptides, as well as agonists or antagonists of the present invention, could stimulate the proliferation and differentiation of hepatocytes and, thus, could be used to alleviate or treat liver diseases and pathologies such as fulminant liver failure caused by cirrhosis, liver damage caused by viral hepatitis and toxic substances (i.e., acetaminophen, carbon tetraholoride and other hepatotoxins known in the art).

[0691] In addition, polynucleotides or polypeptides, as well as agonists or antagonists of the present invention, could be used treat or prevent the onset of diabetes mellitus. In patients with newly diagnosed Types I and II diabetes, where some islet cell function remains, polynucleotides or polypeptides, as well as agonists or antagonists of the present invention, could be used to maintain the islet function so as to alleviate, delay or prevent permanent manifestation of the disease. Also, polynucleotides or polypeptides, as well as agonists or antagonists of the present invention, could be used as an auxiliary in islet cell transplantation to improve or promote islet cell function.

[0692] Endocrine Disorders

[0693] Polynucleotides or polypeptides, or agonists or antagonists of the present invention, may be used to treat, prevent, diagnose, and/or prognose disorders and/or diseases related to hormone imbalance, and/or disorders or diseases of the endocrine system.

[0694] Hormones secreted by the glands of the endocrine system control physical growth, sexual function, metabolism, and other functions. Disorders may be classified in two ways: disturbances in the production of hormones, and the inability of tissues to respond to hormones. The etiology of these hormone imbalance or endocrine system diseases, disorders or conditions may be genetic, somatic, such as cancer and some autoimmune diseases, acquired (e.g., by chemotherapy, injury or toxins), or infectious. Moreover, polynucleotides, polypeptides, antibodies, and/or agonists or antagonists of the present invention can be used as a marker or detector of a particular disease or disorder related to the endocrine system and/or hormone imbalance.

[0695] Endocrine system and/or hormone imbalance and/or diseases encompass disorders of uterine motility including, but not limited to: complications with pregnancy and labor (e.g., pre-term labor, post-term pregnancy, spontaneous abortion, and slow or stopped labor); and disorders and/or diseases of the menstrual cycle (e.g., dysmenorrhea and endometriosis).

[0696] Endocrine system and/or hormone imbalance disorders and/or diseases include disorders and/or diseases of the pancreas, such as, for example, diabetes mellitus, diabetes insipidus, congenital pancreatic agenesis, pheochromocytoma—islet cell tumor syndrome; disorders and/or diseases of the adrenal glands such as, for example, Addison's Disease, corticosteroid deficiency, virilizing disease, hirsutism, Cushing's Syndrome, hyperaldosteronism, pheochromocytoma; disorders and/or diseases of the pituitary gland, such as, for example, hyperpituitarism, hypopituitarism, pituitary dwarfism, pituitary adenoma, panhypopituitarism, acromegaly, gigantism; disorders and/or diseases of the thyroid, including but not limited to, hyperthyroidism, hypothyroidism, Plummer's disease, Graves' disease (toxic diffuse goiter), toxic nodular goiter, thyroiditis (Hashimoto's thyroiditis, subacute granulomatous thyroiditis, and silent lymphocytic thyroiditis), Pendred's syndrome, myxedema, cretinism, thyrotoxicosis, thyroid hormone coupling defect, thymic aplasia, Hurthle cell tumours of the thyroid, thyroid cancer, thyroid carcinoma, Medullary thyroid carcinoma; disorders and/or diseases of the parathyroid, such as, for example, hyperparathyroidism, hypoparathyroidism; disorders and/or diseases of the hypothalamus.

[0697] In addition, endocrine system and/or hormone imbalance disorders and/or diseases may also include disorders and/or diseases of the testes or ovaries, including cancer. Other disorders and/or diseases of the testes or ovaries further include, for example, ovarian cancer, polycystic ovary syndrome, Klinefelter's syndrome, vanishing testes syndrome (bilateral anorchia), congenital absence of Leydig's cells, cryptorchidism, Noonan's syndrome, myotonic dystrophy, capillary haemangioma of the testis (benign), neoplasias of the testis and neo-testis.

[0698] Moreover, endocrine system and/or hormone imbalance disorders and/or diseases may also include disorders and/or diseases such as, for example, polyglandular deficiency syndromes, pheochromocytoma, neuroblastoma, multiple Endocrine neoplasia, and disorders and/or cancers of endocrine tissues.

[0699] In another embodiment, a polypeptide of the invention, or polynucleotides, antibodies, agonists, or antagonists corresponding to that polypeptide, may be used to diagnose, prognose, prevent, and/or treat endocrine diseases and/or disorders associated with the tissue(s) in which the polypeptide of the invention is expressed, including one, two, three, four, five, or more tissues disclosed in Table 1A, column 8 (Tissue Distribution Library Code).

[0700] Reproductive System Disorders

[0701] The polynucleotides or polypeptides, or agonists or antagonists of the invention may be used for the diagnosis, treatment, or prevention of diseases and/or disorders of the reproductive system. Reproductive system disorders that can be treated by the compositions of the invention, include, but are not limited to, reproductive system injuries, infections, neoplastic disorders, congenital defects, and diseases or disorders which result in infertility, complications with pregnancy, labor, or parturition, and postpartum difficulties.

[0702] Reproductive system disorders and/or diseases include diseases and/or disorders of the testes, including testicular atrophy, testicular feminization, cryptorchism (unilateral and bilateral), anorchia, ectopic testis, epididymitis and orchitis (typically resulting from infections such as, for example, gonorrhea, mumps, tuberculosis, and syphilis), testicular torsion, vasitis nodosa, germ cell tumors (e.g., seminomas, embryonal cell carcinomas, teratocarcinomas, choriocarcinomas, yolk sac tumors, and teratomas), stromal tumors (e.g., Leydig cell tumors), hydrocele, hematocele, varicocele, spermatocele, inguinal hernia, and disorders of sperm production (e.g., immotile cilia syndrome, aspermia, asthenozoospermia, azoospermia, oligospermia, and teratozoospermia).

[0703] Reproductive system disorders also include disorders of the prostate gland, such as acute non-bacterial prostatitis, chronic non-bacterial prostatitis, acute bacterial prostatitis, chronic bacterial prostatitis, prostatodystonia, prostatosis, granulomatous prostatitis, malacoplakia, benign prostatic hypertrophy or hyperplasia, and prostate neoplastic disorders, including adenocarcinomas, transitional cell carcinomas, ductal carcinomas, and squamous cell carcinomas.

[0704] Additionally, the compositions of the invention may be useful in the diagnosis, treatment, and/or prevention of disorders or diseases of the penis and urethra, including inflammatory disorders, such as balanoposthitis, balanitis xerotica obliterans, phimosis, paraphimosis, syphilis, herpes simplex virus, gonorrhea, non-gonococcal urethritis, chlamydia, mycoplasma, trichomonas, HIV, AIDS, Reiter's syndrome, condyloma acuminatum, condyloma latum, and pearly penile papules; urethral abnormalities, such as hypospadias, epispadias, and phimosis; premalignant lesions, including Erythroplasia of Queyrat, Bowen's disease, Bowenoid paplosis, giant condyloma of Buscke-Lowenstein, and varrucous carcinoma; penile cancers, including squamous cell carcinomas, carcinoma in situ, verrucous carcinoma, and disseminated penile carcinoma; urethral neoplastic disorders, including penile urethral carcinoma, bulbomembranous urethral carcinoma, and prostatic urethral carcinoma; and erectile disorders, such as priapism, Peyronie's disease, erectile dysfunction, and impotence.

[0705] Moreover, diseases and/or disorders of the vas deferens include vasculititis and CBAVD (congenital bilateral absence of the vas deferens); additionally, the polynucleotides, polypeptides, and agonists or antagonists of the present invention may be used in the diagnosis, treatment, and/or prevention of diseases and/or disorders of the seminal vesicles, including hydatid disease, congenital chloride diarrhea, and polycystic kidney disease.

[0706] Other disorders and/or diseases of the male reproductive system include, for example, Klinefelter's syndrome, Young's syndrome, premature ejaculation, diabetes mellitus, cystic fibrosis, Kartagener's syndrome, high fever, multiple sclerosis, and gynecomastia.

[0707] Further, the polynucleotides, polypeptides, and agonists or antagonists of the present invention may be used in the diagnosis, treatment, and/or prevention of diseases and/or disorders of the vagina and vulva, including bacterial vaginosis, candida vaginitis, herpes simplex virus, chancroid, granuloma inguinale, lymphogranuloma venereum, scabies, human papillomavirus, vaginal trauma, vulvar trauma, adenosis, chlamydia vaginitis, gonorrhea, trichomonas vaginitis, condyloma acuminatum, syphilis, molluscum contagiosum, atrophic vaginitis, Paget's disease, lichen sclerosus, lichen planus, vulvodynia, toxic shock syndrome, vaginismus, vulvovaginitis, vulvar vestibulitis, and neoplastic disorders, such as squamous cell hyperplasia, clear cell carcinoma, basal cell carcinoma, melanomas, cancer of Bartholin's gland, and vulvar intraepithelial neoplasia.

[0708] Disorders and/or diseases of the uterus include dysmenorrhea, retroverted uterus, endometriosis, fibroids, adenomyosis, anovulatory bleeding, amenorrhea, Cushing's syndrome, hydatidiform moles, Asherman's syndrome, premature menopause, precocious puberty, uterine polyps, dysfunctional uterine bleeding (e.g., due to aberrant hormonal signals), and neoplastic disorders, such as adenocarcinomas, keiomyosarcomas, and sarcomas. Additionally, the polypeptides, polynucleotides, or agonists or antagonists of the invention may be useful as a marker or detector of, as well as in the diagnosis, treatment, and/or prevention of congenital uterine abnormalities, such as bicornuate uterus, septate uterus, simple unicornuate uterus, unicornuate uterus with a noncavitary rudimentary horn, unicornuate uterus with a non-communicating cavitary rudimentary horn, unicornuate uterus with a communicating cavitary horn, arcuate uterus, uterine didelfus, and T-shaped uterus.

[0709] Ovarian diseases and/or disorders include anovulation, polycystic ovary syndrome (Stein-Leventhal syndrome), ovarian cysts, ovarian hypofunction, ovarian insensitivity to gonadotropins, ovarian overproduction of androgens, right ovarian vein syndrome, amenorrhea, hirutism, and ovarian cancer (including, but not limited to, primary and secondary cancerous growth, Sertoli-Leydig tumors, endometriod carcinoma of the ovary, ovarian papillary serous adenocarcinoma, ovarian mucinous adenocarcinoma, and Ovarian Krukenberg tumors).

[0710] Cervical diseases and/or disorders include cervicitis, chronic cervicitis, mucopurulent cervicitis, cervical dysplasia, cervical polyps, Nabothian cysts, cervical erosion, cervical incompetence, and cervical neoplasms (including, for example, cervical carcinoma, squamous metaplasia, squamous cell carcinoma, adenosquamous cell neoplasia, and columnar cell neoplasia).

[0711] Additionally, diseases and/or disorders of the reproductive system include disorders and/or diseases of pregnancy, including miscarriage and stillbirth, such as early abortion, late abortion, spontaneous abortion, induced abortion, therapeutic abortion, threatened abortion, missed abortion, incomplete abortion, complete abortion, habitual abortion, missed abortion, and septic abortion; ectopic pregnancy, anemia, Rh incompatibility, vaginal bleeding during pregnancy, gestational diabetes, intrauterine growth retardation, polyhydramnios, HELLP syndrome, abruptio placentae, placenta previa, hyperemesis, preeclampsia, eclampsia, herpes gestationis, and urticaria of pregnancy. Additionally, the polynucleotides, polypeptides, and agonists or antagonists of the present invention may be used in the diagnosis, treatment, and/or prevention of diseases that can complicate pregnancy, including heart disease, heart failure, rheumatic heart disease, congenital heart disease, mitral valve prolapse, high blood pressure, anemia, kidney disease, infectious disease (e.g., rubella, cytomegalovirus, toxoplasmosis, infectious hepatitis, chlamydia, HIV, AIDS, and genital herpes), diabetes mellitus, Graves' disease, thyroiditis, hypothyroidism, Hashimoto's thyroiditis, chronic active hepatitis, cirrhosis of the liver, primary biliary cirrhosis, asthma, systemic lupus eryematosis, rheumatoid arthritis, myasthenia gravis, idiopathic thrombocytopenic purpura, appendicitis, ovarian cysts, gallbladder disorders, and obstruction of the intestine.

[0712] Complications associated with labor and parturition include premature rupture of the membranes, pre-term labor, post-tern pregnancy, postmaturity, labor that progresses too slowly, fetal distress (e.g., abnormal heart rate (fetal or maternal), breathing problems, and abnormal fetal position), shoulder dystocia, prolapsed umbilical cord, amniotic fluid embolism, and aberrant uterine bleeding.

[0713] Further, diseases and/or disorders of the postdelivery period, including endometritis, myometritis, parametritis, peritonitis, pelvic thrombophlebitis, pulmonary embolism, endotoxemia, pyelonephritis, saphenous thrombophlebitis, mastitis, cystitis, postpartum hemorrhage, and inverted uterus.

[0714] Other disorders and/or diseases of the female reproductive system that may be diagnosed, treated, and/or prevented by the polynucleotides, polypeptides, and agonists or antagonists of the present invention include, for example, Turner's syndrome, pseudohermaphroditism, premenstrual syndrome, pelvic inflammatory disease, pelvic congestion (vascular engorgement), frigidity, anorgasmia, dyspareunia, ruptured fallopian tube, and Mittelschmerz.

[0715] Infectious Disease

[0716] Polynucleotides or polypeptides, as well as agonists or antagonists of the present invention can be used to treat or detect infectious agents. For example, by increasing the immune response, particularly increasing the proliferation and differentiation of B and/or T cells, infectious diseases may be treated. The immune response may be increased by either enhancing an existing immune response, or by initiating a new immune response. Alternatively, polynucleotides or polypeptides, as well as agonists or antagonists of the present invention may also directly inhibit the infectious agent, without necessarily eliciting an immune response.

[0717] Viruses are one example of an infectious agent that can cause disease or symptoms that can be treated or detected by a polynucleotide or polypeptide and/or agonist or antagonist of the present invention. Examples of viruses, include, but are not limited to Examples of viruses, include, but are not limited to the following DNA and RNA viruses and viral families: Arbovirus, Adenoviridae, Arenaviridae, Arterivirus, Birnaviridae, Bunyaviridae, Caliciviridae, Circoviridae, Coronaviridae, Dengue, EBV, HIV, Flaviviridae, Hepadnaviridae (Hepatitis), Herpesviridae (such as, Cytomegalovirus, Herpes Simplex, Herpes Zoster), Mononegavirus (e.g., Paramyxoviridae, Morbillivirus, Rhabdoviridae), Orthomyxoviridae (e.g., Influenza A, Influenza B, and parainfluenza), Papiloma virus, Papovaviridae, Parvoviridae, Picomaviridae, Poxyiridae (such as Smallpox or Vaccinia), Reoviridae (e.g., Rotavirus), Retroviridae (HTLV-I, HTLV-II, Lentivirus), and Togaviridae (e.g., Rubivirus). Viruses falling within these families can cause a variety of diseases or symptoms, including, but not limited to: arthritis, bronchiollitis, respiratory syncytial virus, encephalitis, eye infections (e.g., conjunctivitis, keratitis), chronic fatigue syndrome, hepatitis (A, B, C, E, Chronic Active, Delta), Japanese B encephalitis, Junin, Chikungunya, Rift Valley fever, yellow fever, meningitis, opportunistic infections (e.g., AIDS), pneumonia, Burkitt's Lymphoma, chickenpox, hemorrhagic fever, Measles, Mumps, Parainfluenza, Rabies, the common cold, Polio, leukemia, Rubella, sexually transmitted diseases, skin diseases (e.g., Kaposi's, warts), and viremia. polynucleotides or polypeptides, or agonists or antagonists of the invention, can be used to treat or detect any of these symptoms or diseases. In specific embodiments, polynucleotides, polypeptides, or agonists or antagonists of the invention are used to treat: meningitis, Dengue, EBV, and/or hepatitis (e.g., hepatitis B). In an additional specific embodiment polynucleotides, polypeptides, or agonists or antagonists of the invention are used to treat patients nonresponsive to one or more other commercially available hepatitis vaccines. In a further specific embodiment polynucleotides, polypeptides, or agonists or antagonists of the invention are used to treat AIDS.

[0718] Similarly, bacterial and fungal agents that can cause disease or symptoms and that can be treated or detected by a polynucleotide or polypeptide and/or agonist or antagonist of the present invention include, but not limited to, the following Gram-Negative and Gram-positive bacteria, bacterial families, and fungi: Actinomyces (e.g., Norcardia), Acinetobacter, Cryptococcus neoformans, Aspergillus, Bacillaceae (e.g., Bacillus anthrasis), Bacteroides (e.g., Bacteroides fragilis), Blastomycosis, Bordetella, Borrelia (e.g., Borrelia burgdorferi), Brucella, Candidia, Campylobacter, Chlamydia, Clostridium (e.g., Clostridium botulinum, Clostridium dificile, Clostridium perfringens, Clostridium tetani), Coccidioides, Corynebacterium (e.g., Corynebacterium diptheriae), Cryptococcus, Dermatocycoses, E. coli (e.g., Enterotoxigenic E. coli and Enterohemorrhagic E. coli), Enterobacter (e.g. Enterobacter aerogenes), Enterobacteriaceae (Klebsiella, Salmonella (e.g., Salmonella typhi, Salmonella enteritidis, Salmonella typhi), Serratia, Yersinia, Shigella), Erysipelothrix, Haemophilus (e.g., Haemophilus influenza type B), Helicobacter, Legionella (e.g., Legionella pneumophila), Leptospira, Listeria (e.g., Listeria monocytogenes), Mycoplasma, Mycobacterium (e.g., Mycobacterium leprae and Mycobacterium tuberculosis), Vibrio (e.g., Vibrio cholerae), Neisseriaceae (e.g., Neisseria gonorrhea, Neisseria meningitidis), Pasteurellacea, Proteus, Pseudomonas (e.g., Pseudomonas aeruginosa), Rickettsiaceae, Spirochetes (e.g., Treponema spp., Leptospira spp., Borrelia spp.), Shigella spp., Staphylococcus (e.g., Staphylococcus aureus), Meningiococcus, Pneumococcus and Streptococcus (e.g., Streptococcus pneumoniae and Groups A, B, and C Streptococci), and Ureaplasmas. These bacterial, parasitic, and fungal families can cause diseases or symptoms, including, but not limited to: antibiotic-resistant infections, bacteremia, endocarditis, septicemia, eye infections (e.g., conjunctivitis), uveitis, tuberculosis, gingivitis, bacterial diarrhea, opportunistic infections (e.g., AIDS related infections), paronychia, prosthesis-related infections, dental caries, Reiter's Disease, respiratory tract infections, such as Whooping Cough or Empyema, sepsis, Lyme Disease, Cat-Scratch Disease, dysentery, paratyphoid fever, food poisoning, Legionella disease, chronic and acute inflammation, erythema, yeast infections, typhoid, pneumonia, gonorrhea, meningitis (e.g., mengitis types A and B), chlamydia, syphillis, diphtheria, leprosy, brucellosis, peptic ulcers, anthrax, spontaneous abortions, birth defects, pneumonia, lung infections, ear infections, deafness, blindness, lethargy, malaise, vomiting, chronic diarrhea, Crohn's disease, colitis, vaginosis, sterility, pelvic inflammatory diseases, candidiasis, paratuberculosis, tuberculosis, lupus, botulism, gangrene, tetanus, impetigo, Rheumatic Fever, Scarlet Fever, sexually transmitted diseases, skin diseases (e.g., cellulitis, dermatocycoses), toxemia, urinary tract infections, wound infections, noscomial infections. Polynucleotides or polypeptides, agonists or antagonists of the invention, can be used to treat or detect any of these symptoms or diseases. In specific embodiments, polynucleotides, polypeptides, agonists or antagonists of the invention are used to treat: tetanus, diptheria, botulism, and/or meningitis type B.

[0719] Moreover, parasitic agents causing disease or symptoms that can be treated, prevented, and/or diagnosed by a polynucleotide or polypeptide and/or agonist or antagonist of the present invention include, but not limited to, the following families or class: Amebiasis, Babesiosis, Coccidiosis, Cryptosporidiosis, Dientamoebiasis, Dourine, Ectoparasitic, Giardias, Helminthiasis, Leishmaniasis, Schistisoma, Theileriasis, Toxoplasmosis, Trypanosomiasis, and Trichomonas and Sporozoans (e.g., Plasmodium virax, Plasmodium falciparium, Plasmodium malariae and Plasmodium ovale). These parasites can cause a variety of diseases or symptoms, including, but not limited to: Scabies, Trombiculiasis, eye infections, intestinal disease (e.g., dyseritery, giardiasis), liver disease, lung disease, opportunistic infections (e.g., AIDS related), malaria, pregnancy complications, and toxoplasmosis. polynucleotides or polypeptides, or agonists or antagonists of the invention, can be used to treat, prevent, and/or diagnose any of these symptoms or diseases. In specific embodiments, polynucleotides, polypeptides, or agonists or antagonists of the invention are used to treat, prevent, and/or diagnose malaria.

[0720] Polynucleotides or polypeptides, as well as agonists or antagonists of the present invention of the present invention could either be by administering an effective amount of a polypeptide to the patient, or by removing cells from the patient, supplying the cells with a polynucleotide of the present invention, and returning the engineered cells to the patient (ex vivo therapy). Moreover, the polypeptide or polynucleotide of the present invention can be used as an antigen in a vaccine to raise an immune response against infectious disease.

[0721] Regeneration

[0722] Polynucleotides or polypeptides, as well as agonists or antagonists of the present invention can be used to differentiate, proliferate, and attract cells, leading to the regeneration of tissues. (See, Science 276:59-87 (1997)). The regeneration of tissues could be used to repair, replace, or protect tissue damaged by congenital defects, trauma (wounds, bums, incisions, or ulcers), age, disease (e.g. osteoporosis, osteocarthritis, periodontal disease, liver failure), surgery, including cosmetic plastic surgery, fibrosis, reperfusion injury, or systemic cytokine damage.

[0723] Tissues that could be regenerated using the present invention include organs (e.g., pancreas, liver, intestine, kidney, skin, endothelium), muscle (smooth, skeletal or cardiac), vasculature (including vascular and lymphatics), nervous, hematopoietic, and skeletal (bone, cartilage, tendon, and ligament) tissue. Preferably, regeneration occurs without or decreased scarring. Regeneration also may include angiogenesis.

[0724] Moreover, polynucleotides or polypeptides, as well as agonists or antagonists of the present invention, may increase regeneration of tissues difficult to heal. For example, increased tendon/ligament regeneration would quicken recovery time after damage. Polynucleotides or polypeptides, as well as agonists or antagonists of the present invention could also be used prophylactically in an effort to avoid damage. Specific diseases that could be treated include of tendinitis, carpal tunnel syndrome, and other tendon or ligament defects. A further example of tissue regeneration of non-healing wounds includes pressure ulcers, ulcers associated with vascular insufficiency, surgical, and traumatic wounds.

[0725] Similarly, nerve and brain tissue could also be regenerated by using polynucleotides or polypeptides, as well as agonists or antagonists of the present invention, to proliferate and differentiate nerve cells. Diseases that could be treated using this method include central and peripheral nervous system diseases, neuropathies, or mechanical and traumatic disorders (e.g., spinal cord disorders, head trauma, cerebrovascular disease, and stoke). Specifically, diseases associated with peripheral nerve injuries, peripheral neuropathy (e.g., resulting from chemotherapy or other medical therapies), localized neuropathies, and central nervous system diseases (e.g., Alzheimer's disease, Parkinson's disease, Huntington's disease, amyotrophic lateral sclerosis, and Shy-Drager syndrome), could all be treated using the polynucleotides or polypeptides, as well as agonists or antagonists of the present invention.

[0726] Gastrointestinal Disorders

[0727] Polynucleotides or polypeptides, or agonists or antagonists of the present invention, may be used to treat, prevent, diagnose, and/or prognose gastrointestinal disorders, including inflammatory diseases and/or conditions, infections, cancers (e.g., intestinal neoplasms (carcinoid tumor of the small intestine, non-Hodgkin's lymphoma of the small intestine, small bowl lymphoma)), and ulcers, such as peptic ulcers.

[0728] Gastrointestinal disorders include dysphagia, odynophagia, inflammation of the esophagus, peptic esophagitis, gastric reflux, submucosal fibrosis and stricturing, Mallory-Weiss lesions, leiomyomas, lipomas, epidermal cancers, adeoncarcinomas, gastric retention disorders, gastroenteritis, gastric atrophy, gastric/stomach cancers, polyps of the stomach, autoimmune disorders such as pernicious anemia, pyloric stenosis, gastritis (bacterial, viral, eosinophilic, stress-induced, chronic erosive, atrophic, plasma cell, and Ménétrier's), and peritoneal diseases (e.g., chyloperioneum, hemoperitoneum, mesenteric cyst, mesenteric lymphadenitis, mesenteric vascular occlusion, panniculitis, neoplasms, peritonitis, pneumoperitoneum, bubphrenic abscess,).

[0729] Gastrointestinal disorders also include disorders associated with the small intestine, such as malabsorption syndromes, distension, irritable bowel syndrome, sugar intolerance, celiac disease, duodenal ulcers, duodenitis, tropical sprue, Whipple's disease, intestinal lymphangiectasia, Crohn's disease, appendicitis, obstructions of the ileum, Meckel's diverticulum, multiple diverticula, failure of complete rotation of the small and large intestine, lymphoma, and bacterial and parasitic diseases (such as Traveler's diarrhea, typhoid and paratyphoid, cholera, infection by Roundworms (Ascariasis lumbricoides), Hookworms (Ancylostoma duodenale), Threadworms (Enterobius vermicularis), Tapeworms (Taenia saginata, Echinococcus granulosus, Diphyllobothrium spp., and T. solium).

[0730] Liver diseases and/or disorders include intrahepatic cholestasis (alagille syndrome, biliary liver cirrhosis), fatty liver (alcoholic fatty liver, reye syndrome), hepatic vein thrombosis, hepatolentricular degeneration, hepatomegaly, hepatopulmonary syndrome, hepatorenal syndrome, portal hypertension (esophageal and gastric varices), liver abscess (amebic liver abscess), liver cirrhosis (alcoholic, biliary and experimental), alcoholic liver diseases (fatty liver, hepatitis, cirrhosis), parasitic (hepatic echinococcosis, fascioliasis, amebic liver abscess), jaundice (hemolytic, hepatocellular, and cholestatic), cholestasis, portal hypertension, liver enlargement, ascites, hepatitis (alcoholic hepatitis, animal hepatitis, chronic hepatitis (autoimmune, hepatitis B, hepatitis C, hepatitis D, drug induced), toxic hepatitis, viral human hepatitis (hepatitis A, hepatitis B, hepatitis C, hepatitis D, hepatitis E), Wilson's disease, granulomatous hepatitis, secondary biliary cirrhosis, hepatic encephalopathy, portal hypertension, varices, hepatic encephalopathy, primary biliary cirrhosis, primary sclerosing cholangitis, hepatocellular adenoma, hemangiomas, bile stones, liver failure (hepatic encephalopathy, acute liver failure), and liver neoplasms (angiomyolipoma, calcified liver metastases, cystic liver metastases, epithelial tumors, fibrolamellar hepatocarcinoma, focal nodular hyperplasia, hepatic adenoma, hepatobiliary cystadenoma, hepatoblastoma, hepatocellular carcinoma, hepatoma, liver cancer, liver hemangioendothelioma, mesenchymal hamartoma, mesenchymal tumors of liver, nodular regenerative hyperplasia, benign liver tumors (Hepatic cysts [Simple cysts, Polycystic liver disease, Hepatobiliary cystadenoma, Choledochal cyst], Mesenchymal tumors [Mesenchymal hamartoma, Infantile hemangioendothelioma, Hemangioma, Peliosis hepatis, Lipomas, Inflammatory pseudotumor, Miscellaneous], Epithelial tumors [Bile duct epithelium (Bile duct hamartoma, Bile duct adenoma), Hepatocyte (Adenoma, Focal nodular hyperplasia, Nodular regenerative hyperplasia)], malignant liver tumors [hepatocellular, hepatoblastoma, hepatocellular carcinoma, cholangiocellular, cholangiocarcinoma, cystadenocarcinoma, tumors of blood vessels, angiosarcoma, Karposi's sarcoma, hemangioendothelioma, other tumors, embryonal sarcoma, fibrosarcoma, leiomyosarcoma, rhabdomyosarcoma, carcinosarcoma, teratoma, carcinoid, squamous carcinoma, primary lymphoma]), peliosis hepatis, erythrohepatic porphyria, hepatic porphyria (acute intermittent porphyria, porphyria cutanea tarda), Zellweger syndrome).

[0731] Pancreatic diseases and/or disorders include acute pancreatitis, chronic pancreatitis (acute necrotizing pancreatitis, alcoholic pancreatitis), neoplasms (adenocarcinoma of the pancreas, cystadenocarcinoma, insulinoma, gastrinoma, and glucagonoma, cystic neoplasms, islet-cell tumors, pancreoblastoma), and other pancreatic diseases (e.g., cystic fibrosis, cyst (pancreatic pseudocyst, pancreatic fistula, insufficiency)).

[0732] Gallbladder diseases include gallstones (cholelithiasis and choledocholithiasis), postcholecystectomy syndrome, diverticulosis of the gallbladder, acute cholecystitis, chronic cholecystitis, bile duct tumors, and mucocele.

[0733] Diseases and/or disorders of the large intestine include antibiotic-associated colitis, diverticulitis, ulcerative colitis, acquired megacolon, abscesses, fungal and bacterial infections, anorectal disorders (e.g., fissures, hemorrhoids), colonic diseases (colitis, colonic neoplasms [colon cancer, adenomatous colon polyps (e.g., villous adenoma), colon carcinoma, colorectal cancer], colonic diverticulitis, colonic diverticulosis, megacolon [Hirschsprung disease, toxic megacolon]; sigmoid diseases [proctocolitis, sigmoin neoplasms]), constipation, Crohn's disease, diarrhea (infantile diarrhea, dysentery), duodenal diseases (duodenal neoplasms, duodenal obstruction, duodenal ulcer, duodenitis), enteritis (enterocolitis), HIV enteropathy, ileal diseases (ileal neoplasms, ileitis), immunoproliferative small intestinal disease, inflammatory bowel disease (ulcerative colitis, Crohn's disease), intestinal atresia, parasitic diseases (anisakiasis, balantidiasis, blastocystis infections, cryptosporidiosis, dientamoebiasis, amebic dysentery, giardiasis), intestinal fistula (rectal fistula), intestinal neoplasms (cecal neoplasms, colonic neoplasms, duodenal neoplasms, ileal neoplasms, intestinal polyps, jejunal neoplasms, rectal neoplasms), intestinal obstruction (afferent loop syndrome, duodenal obstruction, impacted feces, intestinal pseudo-obstruction [cecal volvulus], intussusception), intestinal perforation, intestinal polyps (colonic polyps, gardner syndrome, peutz-jeghers syndrome), jejunal diseases (jejunal neoplasms), malabsorption syndromes (blind loop syndrome, celiac disease, lactose intolerance, short bowl syndrome, tropical sprue, whipple's disease), mesenteric vascular occlusion, pneumatosis cystoides intestinalis, protein-losing enteropathies (intestinal lymphagiectasis), rectal diseases (anus diseases, fecal incontinence, hemorrhoids, proctitis, rectal fistula, rectal prolapse, rectocele), peptic ulcer (duodenal ulcer, peptic esophagitis, hemorrhage, perforation, stomach ulcer, Zollinger-Ellison syndrome), postgastrectomy syndromes (dumping syndrome), stomach diseases (e.g., achlorhydria, duodenogastric reflux (bile reflux), gastric antral vascular ectasia, gastric fistula, gastric outlet obstruction, gastritis (atrophic or hypertrophic), gastroparesis, stomach dilatation, stomach diverticulum, stomach neoplasms (gastric cancer, gastric polyps, gastric adenocarcinoma, hyperplastic gastric polyp), stomach rupture, stomach ulcer, stomach volvulus), tuberculosis, visceroptosis, vomiting (e.g., hematemesis, hyperemesis gravidarum, postoperative nausea and vomiting) and hemorrhagic colitis.

[0734] Further diseases and/or disorders of the gastrointestinal system include biliary tract diseases, such as, gastroschisis, fistula (e.g., biliary fistula, esophageal fistula, gastric fistula, intestinal fistula, pancreatic fistula), neoplasms (e.g., biliary tract neoplasms, esophageal neoplasms, such as adenocarcinoma of the esophagus, esophageal squamous cell carcinoma, gastrointestinal neoplasms, pancreatic neoplasms, such as adenocarcinoma of the pancreas, mucinous cystic neoplasm of the pancreas, pancreatic cystic neoplasms, pancreatoblastoma, and peritoneal neoplasms), esophageal disease (e.g., bullous diseases, candidiasis, glycogenic acanthosis, ulceration, barrett esophagus varices, atresia, cyst, diverticulum (e.g., Zenker's diverticulum), fistula (e.g., tracheoesophageal fistula), motility disorders (e.g., CREST syndrome, deglutition disorders, achalasia, spasm, gastroesophageal reflux), neoplasms, perforation (e.g., Boerhaave syndrome, Mallory-Weiss syndrome), stenosis, esophagitis, diaphragmatic hernia (e.g., hiatal hernia); gastrointestinal diseases, such as, gastroenteritis (e.g., cholera morbus, norwalk virus infection), hemorrhage (e.g., hematemesis, melena, peptic ulcer hemorrhage), stomach neoplasms (gastric cancer, gastric polyps, gastric adenocarcinoma, stomach cancer)), hernia (e.g., congenital diaphragmatic hernia, femoral hernia, inguinal hernia, obturator hernia, umbilical hernia, ventral hernia), and intestinal diseases (e.g., cecal diseases (appendicitis, cecal neoplasms)).

[0735] Chemotaxis

[0736] Polynucleotides or polypeptides, as well as agonists or antagonists of the present invention may have chemotaxis activity. A chemotaxic molecule attracts or mobilizes cells (e.g., monocytes, fibroblasts, neutrophils, T-cells, mast cells, eosinophils, epithelial and/or endothelial cells) to a particular site in the body, such as inflammation, infection, or site of hyperproliferation. The mobilized cells can then fight off and/or heal the particular trauma or abnormality.

[0737] Polynucleotides or polypeptides, as well as agonists or antagonists of the present invention may increase chemotaxic activity of particular cells. These chemotactic molecules can then be used to treat inflammation, infection, hyperproliferative disorders, or any immune system disorder by increasing the number of cells targeted to a particular location in the body. For example, chemotaxic molecules can be used to treat wounds and other trauma to tissues by attracting immune cells to the injured location. Chemotactic molecules of the present invention can also attract fibroblasts, which can be used to treat wounds.

[0738] It is also contemplated that polynucleotides or polypeptides, as well as agonists or antagonists of the present invention may inhibit chemotactic activity. These molecules could also be used to treat disorders. Thus, polynucleotides or polypeptides, as well as agonists or antagonists of the present invention could be used as an inhibitor of chemotaxis.

[0739] Binding Activity

[0740] A polypeptide of the present invention may be used to screen for molecules that bind to the polypeptide or for molecules to which the polypeptide binds. The binding of the polypeptide and the molecule may activate (agonist), increase, inhibit (antagonist), or decrease activity of the polypeptide or the molecule bound. Examples of such molecules include antibodies, oligonucleotides, proteins (e.g., receptors), or small molecules.

[0741] Preferably, the molecule is closely related to the natural ligand of the polypeptide, e.g., a fragment of the ligand, or a natural substrate, a ligand, a structural or functional mimetic. (See, Coligan et al., Current Protocols in Immunology 1(2):Chapter 5 (1991)). Similarly, the molecule can be closely related to the natural receptor to which the polypeptide binds, or at least, a fragment of the receptor capable of being bound by the polypeptide (e.g., active site). In either case, the molecule can be rationally designed using known techniques.

[0742] Preferably, the screening for these molecules involves producing appropriate cells which express the polypeptide. Preferred cells include cells from mammals, yeast, Drosophila, or E. Coli. Cells expressing the polypeptide (or cell membrane containing the expressed polypeptide) are then preferably contacted with a test compound potentially containing the molecule to observe binding, stimulation, or inhibition of activity of either the polypeptide or the molecule.

[0743] The assay may simply test binding of a candidate compound to the polypeptide, wherein binding is detected by a label, or in an assay involving competition with a labeled competitor. Further, the assay may test whether the candidate compound results in a signal generated by binding to the polypeptide.

[0744] Alternatively, the assay can be carried out using cell-free preparations, polypeptide/molecule affixed to a solid support, chemical libraries, or natural product mixtures. The assay may also simply comprise the steps of mixing a candidate compound with a solution containing a polypeptide, measuring polypeptide/molecule activity or binding, and comparing the polypeptide/molecule activity or binding to a standard.

[0745] Preferably, an ELISA assay can measure polypeptide level or activity in a sample (e.g., biological sample) using a monoclonal or polyclonal antibody. The antibody can measure polypeptide level or activity by either binding, directly or indirectly, to the polypeptide or by competing with the polypeptide for a substrate.

[0746] Additionally, the receptor to which the polypeptide of the present invention binds can be identified by numerous methods known to those of skill in the art, for example, ligand panning and FACS sorting (Coligan, et al., Current Protocols in Immun., 1(2), Chapter 5, (1991)). For example, expression cloning is employed wherein polyadenylated RNA is prepared from a cell responsive to the polypeptides, for example, NIH3T3 cells which are known to contain multiple receptors for the FGF family proteins, and SC-3 cells, and a cDNA library created from this RNA is divided into pools and used to transfect COS cells or other cells that are not responsive to the polypeptides. Transfected cells which are grown on glass slides are exposed to the polypeptide of the present invention, after they have been labeled. The polypeptides can be labeled by a variety of means including iodination or inclusion of a recognition site for a site-specific protein kinase.

[0747] Following fixation and incubation, the slides are subjected to auto-radiographic analysis. Positive pools are identified and sub-pools are prepared and re-transfected using an iterative sub-pooling and re-screening process, eventually yielding a single clones that encodes the putative receptor.

[0748] As an alternative approach for receptor identification, the labeled polypeptides can be photoaffinity linked with cell membrane or extract preparations that express the receptor molecule. Cross-linked material is resolved by PAGE analysis and exposed to X-ray film. The labeled complex containing the receptors of the polypeptides can be excised, resolved into peptide fragments, and subjected to protein microsequencing. The amino acid sequence obtained from microsequencing would be used to design a set of degenerate oligonucleotide probes to screen a cDNA library to identify the genes encoding the putative receptors.

[0749] Moreover, the techniques of gene-shuffling, motif-shuffling, exon-shuffling, and/or codon-shuffling (collectively referred to as “DNA shuffling”) may be employed to modulate the activities of the polypeptide of the present invention thereby effectively generating agonists and antagonists of the polypeptide of the present invention. See generally, U.S. Pat. Nos. 5,605,793, 5,811,238, 5,830,721, 5,834,252, and 5,837,458, and Patten, P. A., et al., Curr. Opinion Biotechnol. 8:724-33 (1997); Harayama, S. Trends Biotechnol. 16(2):76-82 (1998); Hansson, L. O., et al., J. Mol. Biol. 287:265-76 (1999); and Lorenzo, M. M. and Blasco, R. Biotechniques 24(2):308-13 (1998); each of these patents and publications are hereby incorporated by reference). In one embodiment, alteration of polynucleotides and corresponding polypeptides may be achieved by DNA shuffling. DNA shuffling involves the assembly of two or more DNA segments into a desired molecule by homologous, or site-specific, recombination. In another embodiment, polynucleotides and corresponding polypeptides may be altered by being subjected to random mutagenesis by error-prone PCR, random nucleotide insertion or other methods prior to recombination. In another embodiment, one or more components, motifs, sections, parts, domains, fragments, etc., of the polypeptide of the present invention may be recombined with one or more components, motifs, sections, parts, domains, fragments, etc. of one or more heterologous molecules. In preferred embodiments, the heterologous molecules are family members. In further preferred embodiments, the heterologous molecule is a growth factor such as, for example, platelet-derived growth factor (PDGF), insulin-like growth factor (IGF-I), transforming growth factor (TGF)-alpha, epidermal growth factor (EGF), fibroblast growth factor (FGF), TGF-beta, bone morphogenetic protein (BMP)-2, BMP-4, BMP-5, BMP-6, BMP-7, activins A and B, decapentaplegic(dpp), 60A, OP-2, dorsalin, growth differentiation factors (GDFs), nodal, MIS, inhibin-alpha, TGF-beta1, TGF-beta2, TGF-beta3, TGF-beta5, and glial-derived neurotrophic factor (GDNF).

[0750] Other preferred fragments are biologically active fragments of the polypeptide of the present invention. Biologically active fragments are those exhibiting activity similar, but not necessarily identical, to an activity of the polypeptide of the present invention. The biological activity of the fragments may include an improved desired activity, or a decreased undesirable activity.

[0751] Additionally, this invention provides a method of screening compounds to identify those which modulate the action of the polypeptide of the present invention. An example of such an assay comprises combining a mammalian fibroblast cell, a the polypeptide of the present invention, the compound to be screened and ³[H] thymidine under cell culture conditions where the fibroblast cell would normally proliferate. A control assay may be performed in the absence of the compound to be screened and compared to the amount of fibroblast proliferation in the presence of the compound to determine if the compound stimulates proliferation by determining the uptake of ³[H] thymidine in each case. The amount of fibroblast cell proliferation is measured by liquid scintillation chromatography which measures the incorporation of ³[H] thymidine. Both agonist and antagonist compounds may be identified by this procedure.

[0752] In another method, a mammalian cell or membrane preparation expressing a receptor for a polypeptide of the present invention is incubated with a labeled polypeptide of the present invention in the presence of the compound. The ability of the compound to enhance or block this interaction could then be measured. Alternatively, the response of a known second messenger system following interaction of a compound to be screened and the receptor is measured and the ability of the compound to bind to the receptor and elicit a second messenger response is measured to determine if the compound is a potential agonist or antagonist. Such second messenger systems include but are not limited to, cAMP guanylate cyclase, ion channels or phosphoinositide hydrolysis.

[0753] All of these above assays can be used as diagnostic or prognostic markers. The molecules discovered using these assays can be used to treat disease or to bring about a particular result in a patient (e.g., blood vessel growth) by activating or inhibiting the polypeptide/molecule. Moreover, the assays can discover agents which may inhibit or enhance the production of the polypeptides of the invention from suitably manipulated cells or tissues.

[0754] Therefore, the invention includes a method of identifying compounds which bind to a polypeptide of the invention comprising the steps of: (a) incubating a candidate binding compound with a polypeptide of the present invention; and (b) determining if binding has occurred. Moreover, the invention includes a method of identifying agonists/antagonists comprising the steps of: (a) incubating a candidate compound with a polypeptide of the present invention, (b) assaying a biological activity, and (b) determining if a biological activity of the polypeptide has been altered.

[0755] Targeted Delivery

[0756] In another embodiment, the invention provides a method of delivering compositions to targeted cells expressing a receptor for a polypeptide of the invention, or cells expressing a cell bound form of a polypeptide of the invention.

[0757] As discussed herein, polypeptides or antibodies of the invention may be associated with heterologous polypeptides, heterologous nucleic acids, toxins, or prodrugs via hydrophobic, hydrophilic, ionic and/or covalent interactions. In one embodiment, the invention provides a method for the specific delivery of compositions of the invention to cells by administering polypeptides of the invention (including antibodies) that are associated with heterologous polypeptides or nucleic acids. In one example, the invention provides a method for delivering a therapeutic protein into the targeted cell. In another example, the invention provides a method for delivering a single stranded nucleic acid (e.g., antisense or ribozymes) or double stranded nucleic acid (e.g., DNA that can integrate into the cell's genome or replicate episomally and that can be transcribed) into the targeted cell.

[0758] In another embodiment, the invention provides a method for the specific destruction of cells (e.g., the destruction of tumor cells) by administering polypeptides of the invention (e.g., polypeptides of the invention or antibodies of the invention) in association with toxins or cytotoxic prodrugs.

[0759] By “toxin” is meant compounds that bind and activate endogenous cytotoxic effector systems, radioisotopes, holotoxins, modified toxins, catalytic subunits of toxins, or any molecules or enzymes not normally present in or on the surface of a cell that under defined conditions cause the cell's death. Toxins that may be used according to the methods of the invention include, but are not limited to, radioisotopes known in the art, compounds such as, for example, antibodies (or complement fixing containing portions thereof) that bind an inherent or induced endogenous cytotoxic effector system, thymidine kinase, endonuclease, RNAse, alpha toxin, ricin, abrin, Pseudomonas exotoxin A, diphtheria toxin, saporin, momordin, gelonin, pokeweed antiviral protein, alpha-sarcin and cholera toxin. By “cytotoxic prodrug” is meant a non-toxic compound that is converted by an enzyme, normally present in the cell, into a cytotoxic compound. Cytotoxic prodrugs that may be used according to the methods of the invention include, but are not limited to, glutamyl derivatives of benzoic acid mustard alkylating agent, phosphate derivatives of etoposide or mitomycin C, cytosine arabinoside, daunorubisin, and phenoxyacetamide derivatives of doxorubicin.

[0760] Drug Screening

[0761] Further contemplated is the use of the polypeptides of the present invention, or the polynucleotides encoding these polypeptides, to screen for molecules which modify the activities of the polypeptides of the present invention. Such a method would include contacting the polypeptide of the present invention with a selected compound(s) suspected of having antagonist or agonist activity, and assaying the activity of these polypeptides following binding.

[0762] This invention is particularly useful for screening therapeutic compounds by using the polypeptides of the present invention, or binding fragments thereof, in any of a variety of drug screening techniques. The polypeptide or fragment employed in such a test may be affixed to a solid support, expressed on a cell surface, free in solution, or located intracellularly. One method of drug screening utilizes eukaryotic or prokaryotic host cells which are stably transformed with recombinant nucleic acids expressing the polypeptide or fragment. Drugs are screened against such transformed cells in competitive binding assays. One may measure, for example, the formulation of complexes between the agent being tested and a polypeptide of the present invention.

[0763] Thus, the present invention provides methods of screening for drugs or any other agents which affect activities mediated by the polypeptides of the present invention. These methods comprise contacting such an agent with a polypeptide of the present invention or a fragment thereof and assaying for the presence of a complex between the agent and the polypeptide or a fragment thereof, by methods well known in the art. In such a competitive binding assay, the agents to screen are typically labeled. Following incubation, free agent is separated from that present in bound form, and the amount of free or uncomplexed label is a measure of the ability of a particular agent to bind to the polypeptides of the present invention.

[0764] Another technique for drug screening provides high throughput screening for compounds having suitable binding affinity to the polypeptides of the present invention, and is described in great detail in European Patent Application 84/03564, published on Sep. 13, 1984, which is incorporated herein by reference herein. Briefly stated, large numbers of different small peptide test compounds are synthesized on a solid substrate, such as plastic pins or some other surface. The peptide test compounds are reacted with polypeptides of the present invention and washed. Bound polypeptides are then detected by methods well known in the art. Purified polypeptides are coated directly onto plates for use in the aforementioned drug screening techniques. In addition, non-neutralizing antibodies may be used to capture the peptide and immobilize it on the solid support.

[0765] This invention also contemplates the use of competitive drug screening assays in which neutralizing antibodies capable of binding polypeptides of the present invention specifically compete with a test compound for binding to the polypeptides or fragments thereof. In this manner, the antibodies are used to detect the presence of any peptide which shares one or more antigenic epitopes with a polypeptide of the invention.

[0766] Antisense and Ribozyme (Antagonists)

[0767] In specific embodiments, antagonists according to the present invention are nucleic acids corresponding to the sequences contained in SEQ ID NO:X, or the complementary strand thereof, and/or to cDNA sequences contained in cDNA Clone ID NO:Z identified for example, in Table 1A. In one embodiment, antisense sequence is generated internally, by the organism, in another embodiment, the antisense sequence is separately administered (see, for example, O'Connor, J., Neurochem. 56:560 (1991). Oligodeoxynucleotides as Antisense Inhibitors of Gene Expression, CRC Press, Boca Raton, Fla. (1988). Antisense technology can be used to control gene expression through antisense DNA or RNA, or through triple-helix formation. Antisense techniques are discussed for example, in Okano, J., Neurochem. 56:560 (1991); Oligodeoxynucleotides as Antisense Inhibitors of Gene Expression, CRC Press, Boca Raton, Fla. (1988). Triple helix formation is discussed in, for instance, Lee et al., Nucleic Acids Research 6:3073 (1979); Cooney et al., Science 241:456 (1988); and Dervan et al., Science 251:1300 (1991). The methods are based on binding of a polynucleotide to a complementary DNA or RNA.

[0768] For example, the use of c-myc and c-myb antisense RNA constructs to inhibit the growth of the non-lymphocytic leukemia cell line HL-60 and other cell lines was previously described. (Wickstrom et al. (1988); Anfossi et al. (1989)). These experiments were performed in vitro by incubating cells with the oligoribonucleotide. A similar procedure for in vivo use is described in WO 91/15580. Briefly, a pair of oligonucleotides for a given antisense RNA is produced as follows: A sequence complimentary to the first 15 bases of the open reading frame is flanked by an EcoRI site on the 5 end and a HindIII site on the 3 end. Next, the pair of oligonucleotides is heated at 90° C. for one minute and then annealed in 2× ligation buffer (20 mM TRIS HCl pH 7.5, 10 mM MgCl2, 10MM dithiothreitol (DTT) and 0.2 mM ATP) and then ligated to the EcoRI/Hind III site of the retroviral vector PMV7 (WO 91/15580).

[0769] For example, the 5′ coding portion of a polynucleotide that encodes the polypeptide of the present invention may be used to design an antisense RNA oligonucleotide of from about 10 to 40 base pairs in length. A DNA oligonucleotide is designed to be complementary to a region of the gene involved in transcription thereby preventing transcription and the production of the receptor. The antisense RNA oligonucleotide hybridizes to the mRNA in vivo and blocks translation of the mRNA molecule into receptor polypeptide.

[0770] In one embodiment, the antisense nucleic acid of the invention is produced intracellularly by transcription from an exogenous sequence. For example, a vector or a portion thereof, is transcribed, producing an antisense nucleic acid (RNA) of the invention. Such a vector would contain a sequence encoding the antisense nucleic acid. Such a vector can remain episomal or become chromosomally integrated, as long as it can be transcribed to produce the desired antisense RNA. Such vectors can be constructed by recombinant DNA technology methods standard in the art. Vectors can be plasmid, viral, or others known in the art, used for replication and expression in vertebrate cells. Expression of the sequence encoding the polypeptide of the present invention or fragments thereof, can be by any promoter known in the art to act in vertebrate, preferably human cells. Such promoters can be inducible or constitutive. Such promoters include, but are not limited to, the SV40 early promoter region (Bernoist and Chambon, Nature 29:304-310 (1981), the promoter contained in the 3′ long terminal repeat of Rous sarcoma virus (Yamamoto et al., Cell 22:787-797 (1980), the herpes thymidine promoter (Wagner et al., Proc. Natl. Acad. Sci. U.S.A. 78:1441-1445 (1981), the regulatory sequences of the metallothionein gene (Brinster, et al., Nature 296:39-42 (1982)), etc.

[0771] The antisense nucleic acids of the invention comprise a sequence complementary to at least a portion of an RNA transcript of a gene of the present invention. However, absolute complementarity, although preferred, is not required. A sequence “complementary to at least a portion of an RNA,” referred to herein, means a sequence having sufficient complementarity to be able to hybridize with the RNA, forming a stable duplex; in the case of double stranded antisense nucleic acids, a single strand of the duplex DNA may thus be tested, or triplex formation may be assayed. The ability to hybridize will depend on both the degree of complementarity and the length of the antisense nucleic acid. Generally, the larger the hybridizing nucleic acid, the more base mismatches with a RNA it may contain and still form a stable duplex (or triplex as the case may be). One skilled in the art can ascertain a tolerable degree of mismatch by use of standard procedures to determine the melting point of the hybridized complex.

[0772] Oligonucleotides that are complementary to the 5′ end of the message, e.g., the 5′ untranslated sequence up to and including the AUG initiation codon, should work most efficiently at inhibiting translation. However, sequences complementary to the 3′ untranslated sequences of mRNAs have been shown to be effective at inhibiting translation of mRNAs as well. See generally, Wagner, R., 1994, Nature 372:333-335. Thus, oligonucleotides complementary to either the 5′- or 3′-non-translated, non-coding regions of polynucleotide sequences described herein could be used in an antisense approach to inhibit translation of endogenous mRNA. Oligonucleotides complementary to the 5′ untranslated region of the mRNA should include the complement of the AUG start codon. Antisense oligonucleotides complementary to mRNA coding regions are less efficient inhibitors of translation but could be used in accordance with the invention. Whether designed to hybridize to the 5′-, 3′- or coding region of mRNA of the present invention, antisense nucleic acids should be at least six nucleotides in length, and are preferably oligonucleotides ranging from 6 to about 50 nucleotides in length. In specific aspects the oligonucleotide is at least 10 nucleotides, at least 17 nucleotides, at least 25 nucleotides or at least 50 nucleotides.

[0773] The polynucleotides of the invention can be DNA or RNA or chimeric mixtures or derivatives or modified versions thereof, single-stranded or double-stranded. The oligonucleotide can be modified at the base moiety, sugar moiety, or phosphate backbone, for example, to improve stability of the molecule, hybridization, etc. The oligonucleotide may include other appended groups such as peptides (e.g., for targeting host cell receptors i[vivo), or agents facilitating transport across the cell membrane (see, e.g., Letsinger et al., 1989, Proc. Natl. Acad. Sci. U.S.A. 86:6553-6556; Lemaitre et al., 1987, Proc. Natl. Acad. Sci. 84:648-652; PCT Publication No. WO88/09810, published Dec. 15, 1988) or the blood-brain barrier (see, e.g., PCT Publication No. WO89/10134, published Apr. 25, 1988), hybridization-triggered cleavage agents. (See, e.g., Krol et al., 1988, BioTechniques 6:958-976) or intercalating agents. (See, e.g., Zon, 1988, Pharm. Res. 5:539-549). To this end, the oligonucleotide may be conjugated to another molecule, e.g., a peptide, hybridization triggered cross-linking agent, transport agent, hybridization-triggered cleavage agent, etc.

[0774] The antisense oligonucleotide may comprise at least one modified base moiety which is selected from the group including, but not limited to, 5-fluorouracil, 5-bromouracil, 5-chlorouracil, 5-iodouracil, hypoxanthine, xantine, 4-acetylcytosine, 5-(carboxyhydroxylmethyl) uracil, 5-carboxymethylaminomethyl-2-thiouridine, 5-carboxymethylaminomethyluracil, dihydrouracil, beta-D-galactosylqueosine, inosine, N6-isopentenyladenine, 1-methylguanine, 1-methylinosine, 2,2-dimethylguanine, 2-methyladenine, 2-methylguanine, 3-methylcytosine, 5-methylcytosine, N6-adenine, 7-methylguanine, 5-methylaminomethyluracil, 5-methoxyaminomethyl-2-thiouracil, beta-D-mannosylqueosine, 5′-methoxycarboxymethyluracil, 5-methoxyuracil, 2-methylthio-N-6-isopentenyladenine, uracil-5-oxyacetic acid (v), wybutoxosine, pseudouracil, queosine, 2-thiocytosine, 5-methyl-2-thiouracil, 2-thiouracil, 4-thiouracil, 5-methyluracil, uracil-5-oxyacetic acid methylester, uracil-5-oxyacetic acid (v), 5-methyl-2-thiouracil, 3-(3-amino-3-N-2-carboxypropyl) uracil, (acp3)w, and 2,6-diaminopurine.

[0775] The antisense oligonucleotide may also comprise at least one modified sugar moiety selected from the group including, but not limited to, arabinose, 2-fluoroarabinose, xylulose, and hexose.

[0776] In yet another embodiment, the antisense oligonucleotide comprises at least one modified phosphate backbone selected from the group including, but not limited to, a phosphorothioate, a phosphorodithioate, a phosphoramidothioate, a phosphoramidate, a phosphordiamidate, a methylphosphonate, an alkyl phosphotriester, and a formacetal or analog thereof.

[0777] In yet another embodiment, the antisense oligonucleotide is an a-anomeric oligonucleotide. An a-anomeric oligonucleotide forms specific double-stranded hybrids with complementary RNA in which, contrary to the usual b-units, the strands run parallel to each other (Gautier et al., 1987, Nucl. Acids Res. 15:6625-6641). The oligonucleotide is a 2′-O-methylribonucleotide (Inoue et al., 1987, Nucl. Acids Res. 15:6131-6148), or a chimeric RNA-DNA analogue (Inoue et al., 1987, FEBS Lett. 215:327-330).

[0778] Polynucleotides of the invention may be synthesized by standard methods known in the art, e.g. by use of an automated DNA synthesizer (such as are commercially available from Biosearch, Applied Biosystems, etc.). As examples, phosphorothioate oligonucleotides may be synthesized by the method of Stein et al. (1988, Nucl. Acids Res. 16:3209), methylphosphonate oligonucleotides can be prepared by use of controlled pore glass polymer supports (Sarin et al., 1988, Proc. Natl. Acad. Sci. U.S.A. 85:7448-7451), etc.

[0779] While antisense nucleotides complementary to the coding region sequence could be used, those complementary to the transcribed untranslated region are most preferred.

[0780] Potential antagonists according to the invention also include catalytic RNA, or a ribozyme (See, e.g., PCT International Publication WO 90/11364, published Oct. 4, 1990; Sarver et al, Science 247:1222-1225 (1990). While ribozymes that cleave mRNA at site specific recognition sequences can be used to destroy mRNAs, the use of hammerhead ribozymes is preferred. Hammerhead ribozymes cleave mRNAs at locations dictated by flanking regions that form complementary base pairs with the target mRNA. The sole requirement is that the target mRNA have the following sequence of two bases: 5′-UG-3′. The construction and production of hammerhead ribozymes is well known in the art and is described more fully in Haseloff and Gerlach, Nature 334:585-591 (1988). There are numerous potential hammerhead ribozyme cleavage sites within the nucleotide sequence of SEQ ID NO:X. Preferably, the ribozyme is engineered so that the cleavage recognition site is located near the 5′ end of the mRNA; i.e., to increase efficiency and minimize the intracellular accumulation of non-functional mRNA transcripts.

[0781] As in the antisense approach, the ribozymes of the invention can be composed of modified oligonucleotides (e.g., for improved stability, targeting, etc.) and should be delivered to cells which express in vivo. DNA constructs encoding the ribozyme may be introduced into the cell in the same manner as described above for the introduction of antisense encoding DNA. A preferred method of delivery involves using a DNA construct “encoding” the ribozyme under the control of a strong constitutive promoter, such as, for example, pol III or pol II promoter, so that transfected cells will produce sufficient quantities of the ribozyme to destroy endogenous messages and inhibit translation. Since ribozymes unlike antisense molecules, are catalytic, a lower intracellular concentration is required for efficiency.

[0782] Antagonist/agonist compounds may be employed to inhibit the cell growth and proliferation effects of the polypeptides of the present invention on neoplastic cells and tissues, i.e. stimulation of angiogenesis of tumors, and, therefore, retard or prevent abnormal cellular growth and proliferation, for example, in tumor formation or growth.

[0783] The antagonist/agonist may also be employed to prevent hyper-vascular diseases, and prevent the proliferation of epithelial lens cells after extracapsular cataract surgery. Prevention of the mitogenic activity of the polypeptides of the present invention may also be desirous in cases such as restenosis after balloon angioplasty.

[0784] The antagonist/agonist may also be employed to prevent the growth of scar tissue during wound healing.

[0785] The antagonist/agonist may also be employed to treat the diseases described herein.

[0786] Thus, the invention provides a method of treating disorders or diseases, including but not limited to the disorders or diseases listed throughout this application, associated with overexpression of a polynucleotide of the present invention by administering to a patient (a) an antisense molecule directed to the polynucleotide of the present invention, and/or (b) a ribozyme directed to the polynucleotide of the present invention.

[0787] Binding Peptides and Other Molecules

[0788] The invention also encompasses screening methods for identifying polypeptides and nonpolypeptides that bind polypeptides of the invention, and the binding molecules identified thereby. These binding molecules are useful, for example, as agonists and antagonists of the polypeptides of the invention. Such agonists and antagonists can be used, in accordance with the invention, in the therapeutic embodiments described in detail, below.

[0789] This method comprises the steps of:

[0790] a. contacting polypeptides of the invention with a plurality of molecules; and

[0791] b. identifying a molecule that binds the polypeptides of the invention.

[0792] The step of contacting the polypeptides of the invention with the plurality of molecules may be effected in a number of ways. For example, one may contemplate immobilizing the polypeptides on a solid support and bringing a solution of the plurality of molecules in contact with the immobilized polypeptides. Such a procedure would be akin to an affinity chromatographic process, with the affinity matrix being comprised of the immobilized polypeptides of the invention. The molecules having a selective affinity for the polypeptides can then be purified by affinity selection. The nature of the solid support, process for attachment of the polypeptides to the solid support, solvent, and conditions of the affinity isolation or selection are largely conventional and well known to those of ordinary skill in the art.

[0793] Alternatively, one may also separate a plurality of polypeptides into substantially separate fractions comprising a subset of or individual polypeptides. For instance, one can separate the plurality of polypeptides by gel electrophoresis, column chromatography, or like method known to those of ordinary skill for the separation of polypeptides. The individual polypeptides can also be produced by a transformed host cell in such a way as to be expressed on or about its outer surface (e.g., a recombinant phage). Individual isolates can then be “probed” by the polypeptides of the invention, optionally in the presence of an inducer should one be required for expression, to determine if any selective affinity interaction takes place between the polypeptides and the individual clone. Prior to contacting the polypeptides with each fraction comprising individual polypeptides, the polypeptides could first be transferred to a solid support for additional convenience. Such a solid support may simply be a piece of filter membrane, such as one made of nitrocellulose or nylon. In this manner, positive clones could be identified from a collection of transformed host cells of an expression library, which harbor a DNA construct encoding a polypeptide having a selective affinity for polypeptides of the invention. Furthermore, the amino acid sequence of the polypeptide having a selective affinity for the polypeptides of the invention can be determined directly by conventional means or the coding sequence of the DNA encoding the polypeptide can frequently be determined more conveniently. The primary sequence can then be deduced from the corresponding DNA sequence. If the amino acid sequence is to be determined from the polypeptide itself, one may use microsequencing techniques. The sequencing technique may include mass spectroscopy.

[0794] In certain situations, it may be desirable to wash away any unbound polypeptides from a mixture of the polypeptides of the invention and the plurality of polypeptides prior to attempting to determine or to detect the presence of a selective affinity interaction. Such a wash step may be particularly desirable when the polypeptides of the invention or the plurality of polypeptides are bound to a solid support.

[0795] The plurality of molecules provided according to this method may be provided by way of diversity libraries, such as random or combinatorial peptide or nonpeptide libraries which can be screened for molecules that specifically bind polypeptides of the invention. Many libraries are known in the art that can be used, e.g., chemically synthesized libraries, recombinant (e.g., phage display libraries), and in vitro translation-based libraries. Examples of chemically synthesized libraries are described in Fodor et al., 1991, Science 251:767-773; Houghten et al., 1991, Nature 354:84-86; Lam et al., 1991, Nature 354:82-84; Medynski, 1994, Bio/Technology 12:709-710;Gallop et al., 1994, J. Medicinal Chemistry 37(9):1233-1251; Ohlmeyer et al., 1993, Proc. Natl. Acad. Sci. USA 90:10922-10926; Erb et al., 1994, Proc. Natl. Acad. Sci. USA 91:11422-11426; Houghten et al., 1992, Biotechniques 13:412; Jayawickreme et al., 1994, Proc. Natl. Acad. Sci. USA 91:1614-1618; Salmon et al., 1993, Proc. Natl. Acad. Sci. USA 90:11708-11712; PCT Publication No. WO 93/20242; and Brenner and Lerner, 1992, Proc. Natl. Acad. Sci. USA 89:5381-5383.

[0796] Examples of phage display libraries are described in Scott and Smith, 1990, Science 249:386-390; Devlin et al., 1990, Science, 249:404-406; Christian, R. B., et al., 1992, J. Mol. Biol. 227:711-718); Lenstra, 1992, J. Immunol. Meth. 152:149-157; Kay et al., 1993, Gene 128:59-65; and PCT Publication No. WO 94/18318 dated Aug. 18, 1994. 1746] In vitro translation-based libraries include but are not limited to those described in PCT Publication No. WO 91/05058 dated Apr. 18, 1991; and Mattheakis et al., 1994, Proc. Natl. Acad. Sci. USA 91:9022-9026.

[0797] By way of examples of nonpeptide libraries, a benzodiazepine library (see e.g., Bunin et al., 1994, Proc. Natl. Acad. Sci. USA 91:4708-4712) can be adapted for use. Peptoid libraries (Simon et al., 1992, Proc. Natl. Acad. Sci. USA 89:9367-9371) can also be used. Another example of a library that can be used, in which the amide functionalities in peptides have been permethylated to generate a chemically transformed combinatorial library, is described by Ostresh et al. (1994, Proc. Natl. Acad. Sci. USA 91:11138-11142).

[0798] The variety of non-peptide libraries that are useful in the present invention is great. For example, Ecker and Crooke, 1995, Bio/Technology 13:351-360 list benzodiazepines, hydantoins, piperazinediones, biphenyls, sugar analogs, beta-mercaptoketones, arylacetic acids, acylpiperidines, benzopyrans, cubanes, xanthines, aminimides, and oxazolones as among the chemical species that form the basis of various libraries.

[0799] Non-peptide libraries can be classified broadly into two types: decorated monomers and oligomers. Decorated monomer libraries employ a relatively simple scaffold structure upon which a variety functional groups is added. Often the scaffold will be a molecule with a known useful pharmacological activity. For example, the scaffold might be the benzodiazepine structure.

[0800] Non-peptide oligomer libraries utilize a large number of monomers that are assembled together in ways that create new shapes that depend on the order of the monomers. Among the monomer units that have been used are carbamates, pyrrolinones, and morpholinos. Peptoids, peptide-like oligomers in which the side chain is attached to the alpha amino group rather than the alpha carbon, form the basis of another version of non-peptide oligomer libraries. The first non-peptide oligomer libraries utilized a single type of monomer and thus contained a repeating backbone. Recent libraries have utilized more than one monomer, giving the libraries added flexibility.

[0801] Screening the libraries can be accomplished by any of a variety of commonly known methods. See, e.g., the following references, which disclose screening of peptide libraries: Parmley and Smith, 1989, Adv. Exp. Med. Biol. 251:215-218; Scott and Smith, 1990, Science 249:386-390; Fowlkes et al., 1992; BioTechniques 13:422-427; Oldenburg et al., 1992, Proc. Natl. Acad. Sci. USA 89:5393-5397; Yu et al., 1994, Cell 76:933-945; Staudt et al., 1988, Science 241:577-580; Bock et al., 1992, Nature 355:564-566; Tuerk et al., 1992, Proc. Natl. Acad. Sci. USA 89:6988-6992; Ellington et al., 1992, Nature 355:850-852; U.S. Pat. No. 5,096,815, U.S. Pat. No. 5,223,409, and U.S. Pat. No. 5,198,346, all to Ladner et al.; Rebar and Pabo, 1993, Science 263:671-673; and CT Publication No. WO 94/18318.

[0802] In a specific embodiment, screening to identify a molecule that binds polypeptides of the invention can be carried out by contacting the library members with polypeptides of the invention immobilized on a solid phase and harvesting those library members that bind to the polypeptides of the invention. Examples of such screening methods, termed “panning” techniques are described by way of example in Parmley and Smith, 1988, Gene 73:305-318; Fowlkes et al., 1992, BioTechniques 13:422-427; PCT Publication No. WO 94/18318; and in references cited herein.

[0803] In another embodiment, the two-hybrid system for selecting interacting proteins in yeast (Fields and Song, 1989, Nature 340:245-246; Chien et al., 1991, Proc. Natl. Acad. Sci. USA 88:9578-9582) can be used to identify molecules that specifically bind to polypeptides of the invention.

[0804] Where the binding molecule is a polypeptide, the polypeptide can be conveniently selected from any peptide library, including random peptide libraries, combinatorial peptide libraries, or biased peptide libraries. The term “biased” is used herein to mean that the method of generating the library is manipulated so as to restrict one or more parameters that govern the diversity of the resulting collection of molecules, in this case peptides.

[0805] Thus, a truly random peptide library would generate a collection of peptides in which the probability of finding a particular amino acid at a given position of the peptide is the same for all 20 amino acids. A bias can be introduced into the library, however, by specifying, for example, that a lysine occur every fifth amino acid or that positions 4, 8, and 9 of a decapeptide library be fixed to include only arginine. Clearly, many types of biases can be contemplated, and the present invention is not restricted to any particular bias. Furthermore, the present invention contemplates specific types of peptide libraries, such as phage displayed peptide libraries and those that utilize a DNA construct comprising a lambda phage vector with a DNA insert.

[0806] As mentioned above, in the case of a binding molecule that is a polypeptide, the polypeptide may have about 6 to less than about 60 amino acid residues, preferably about 6 to about 10 amino acid residues, and most preferably, about 6 to about 22 amino acids. In another embodiment, a binding polypeptide has in the range of 15-100 amino acids, or 20-50 amino acids.

[0807] The selected binding polypeptide can be obtained by chemical synthesis or recombinant expression.

[0808] Other Activities

[0809] A polypeptide, polynucleotide, agonist, or antagonist of the present invention, as a result of the ability to stimulate vascular endothelial cell growth, may be employed in treatment for stimulating re-vascularization of ischemic tissues due to various disease conditions such as thrombosis, arteriosclerosis, and other cardiovascular conditions. The polypeptide, polynucleotide, agonist, or antagonist of the present invention may also be employed to stimulate angiogenesis and limb regeneration, as discussed above.

[0810] A polypeptide, polynucleotide, agonist, or antagonist of the present invention may also be employed for treating wounds due to injuries, burns, post-operative tissue repair, and ulcers since they are mitogenic to various cells of different origins, such as fibroblast cells and skeletal muscle cells, and therefore, facilitate the repair or replacement of damaged or diseased tissue.

[0811] A polypeptide, polynucleotide, agonist, or antagonist of the present invention may also be employed stimulate neuronal growth and to treat and prevent neuronal damage which occurs in certain neuronal disorders or neuro-degenerative conditions such as Alzheimer's disease, Parkinson's disease, and AIDS-related complex. A polypeptide, polynucleotide, agonist, or antagonist of the present invention may have the ability to stimulate chondrocyte growth, therefore, they may be employed to enhance bone and periodontal regeneration and aid in tissue transplants or bone grafts.

[0812] A polypeptide, polynucleotide, agonist, or antagonist of the present invention may be also be employed to prevent skin aging due to sunburn by stimulating keratinocyte growth.

[0813] A polypeptide, polynucleotide, agonist, or antagonist of the present invention may also be employed for preventing hair loss, since FGF family members activate hair-forming cells and promotes melanocyte growth. Along the same lines, a polypeptide, polynucleotide, agonist, or antagonist of the present invention may be employed to stimulate growth and differentiation of hematopoietic cells and bone marrow cells when used in combination with other cytokines.

[0814] A polypeptide, polynucleotide, agonist, or antagonist of the present invention may also be employed to maintain organs before transplantation or for supporting cell culture of primary tissues. A polypeptide, polynucleotide, agonist, or antagonist of the present invention may also be employed for inducing tissue of mesodermal origin to differentiate in early embryos.

[0815] A polypeptide, polynucleotide, agonist, or antagonist of the present invention may also increase or decrease the differentiation or proliferation of embryonic stem cells, besides, as discussed above, hematopoietic lineage.

[0816] A polypeptide, polynucleotide, agonist, or antagonist of the present invention may also be used to modulate mammalian characteristics, such as body height, weight, hair color, eye color, skin, percentage of adipose tissue, pigmentation, size, and shape (e.g., cosmetic surgery). Similarly, a polypeptide, polynucleotide, agonist, or antagonist of the present invention may be used to modulate mammalian metabolism affecting catabolism, anabolism, processing, utilization, and storage of energy.

[0817] A polypeptide, polynucleotide, agonist, or antagonist of the present invention may be used to change a mammal's mental state or physical state by influencing biorhythms, caricadic rhythms, depression (including depressive disorders), tendency for violence, tolerance for pain, reproductive capabilities (preferably by Activin or Inhibin-like activity), hormonal or endocrine levels, appetite, libido, memory, stress, or other cognitive qualities.

[0818] A polypeptide, polynucleotide, agonist, or antagonist of the present invention may also be used as a food additive or preservative, such as to increase or decrease storage capabilities, fat content, lipid, protein, carbohydrate, vitamins, minerals, cofactors or other nutritional components.

[0819] The above-recited applications have uses in a wide variety of hosts. Such hosts include, but are not limited to, human, murine, rabbit, goat, guinea pig, camel, horse, mouse, rat, hamster, pig, micro-pig, chicken, goat, cow, sheep, dog, cat, non-human primate, and human. In specific embodiments, the host is a mouse, rabbit, goat, guinea pig, chicken, rat, hamster, pig, sheep, dog or cat. In preferred embodiments, the host is a mammal. In most preferred embodiments, the host is a human.

[0820] Other Preferred Embodiments

[0821] Other preferred embodiments of the claimed invention include an isolated nucleic acid molecule comprising a nucleotide sequence which is at least 95% identical to a sequence of at least about 50 contiguous nucleotides in the nucleotide sequence of SEQ ID NO:X or the complementary strand thereto, the nucleotide sequence as defined in column 5 of Table 1A or columns 8 and 9 of Table 2 or the complementary strand thereto, and/or cDNA contained in Clone ID NO:Z.

[0822] Also preferred is a nucleic acid molecule wherein said sequence of contiguous nucleotides is included in the nucleotide sequence of the portion of SEQ ID NO:X as defined in column 5, “ORF (From-To)”, in Table 1A.

[0823] Also preferred is a nucleic acid molecule wherein said sequence of contiguous nucleotides is included in the nucleotide sequence of the portion of SEQ ID NO:X as defined in columns 8 and 9, “NT From” and “NT To” respectively, in Table 2.

[0824] Also preferred is an isolated nucleic acid molecule comprising a nucleotide sequence which is at least 95% identical to a sequence of at least about 150 contiguous nucleotides in the nucleotide sequence of SEQ ID NO:X or the complementary strand thereto, the nucleotide sequence as defined in column 5 of Table 1A or columns 8 and 9 of Table 2 or the complementary strand thereto, and/or cDNA contained in Clone ID NO:Z.

[0825] Further preferred is an isolated nucleic acid molecule comprising a nucleotide sequence which is at least 95% identical to a sequence of at least about 500 contiguous nucleotides in the nucleotide sequence of SEQ ID NO:X or the complementary strand thereto, the nucleotide sequence as defined in column 5 of Table 1A or columns 8 and 9 of Table 2 or the complementary strand thereto, and/or cDNA contained in Clone ID NO:Z.

[0826] A further preferred embodiment is a nucleic acid molecule comprising a nucleotide sequence which is at least 95% identical to the nucleotide sequence of the portion of SEQ ID NO:X defined in column 5, “ORF (From-To)”, in Table 1A.

[0827] A further preferred embodiment is a nucleic acid molecule comprising a nucleotide sequence which is at least 95% identical to the nucleotide sequence of the portion of SEQ ID NO:X defined in columns 8 and 9, “NT From” and “NT To”, respectively, in Table 2.

[0828] A further preferred embodiment is an isolated nucleic acid molecule comprising a nucleotide sequence which is at least 95% identical to the complete nucleotide sequence of SEQ ID NO:X or the complementary strand thereto, the nucleotide sequence as defined in column 5 of Table 1A or columns 8 and 9 of Table 2 or the complementary strand thereto, and/or cDNA contained in Clone ID NO:Z.

[0829] Also preferred is an isolated nucleic acid molecule which hybridizes under stringent hybridization conditions to a nucleic acid molecule comprising a nucleotide sequence of SEQ ID NO:X or the complementary strand thereto, the nucleotide sequence as defined in column 5 of Table 1A or columns 8 and 9 of Table 2 or the complementary strand thereto, and/or cDNA contained in Clone ID NO:Z, wherein said nucleic acid molecule which hybridizes does not hybridize under stringent hybridization conditions to a nucleic acid molecule having a nucleotide sequence consisting of only A residues or of only T residues.

[0830] Also preferred is a composition of matter comprising a DNA molecule which comprises the cDNA contained in Clone ID NO:Z.

[0831] Also preferred is an isolated nucleic acid molecule comprising a nucleotide sequence which is at least 95% identical to a sequence of at least 50 contiguous nucleotides of the cDNA sequence contained in Clone ID NO:Z.

[0832] Also preferred is an isolated nucleic acid molecule, wherein said sequence of at least 50 contiguous nucleotides is included in the nucleotide sequence of an open reading frame sequence encoded by cDNA contained in Clone ID NO:Z.

[0833] Also preferred is an isolated nucleic acid molecule comprising a nucleotide sequence which is at least 95% identical to sequence of at least 150 contiguous nucleotides in the nucleotide sequence encoded by cDNA contained in Clone ID NO:Z.

[0834] A further preferred embodiment is an isolated nucleic acid molecule comprising a nucleotide sequence which is at least 95% identical to sequence of at least 500 contiguous nucleotides in the nucleotide sequence encoded by cDNA contained in Clone ID NO:Z.

[0835] A further preferred embodiment is an isolated nucleic acid molecule comprising a nucleotide sequence which is at least 95% identical to the complete nucleotide sequence encoded by cDNA contained in Clone ID NO:Z.

[0836] A further preferred embodiment is a method for detecting in a biological sample a nucleic acid molecule comprising a nucleotide sequence which is at least 95% identical to a sequence of at least 50 contiguous nucleotides in a sequence selected from the group consisting of: a nucleotide sequence of SEQ ID NO:X or the complementary strand thereto; the nucleotide sequence as defined in column 5 of Table 1A or columns 8 and 9 of Table 2 or the complementary strand thereto; and a nucleotide sequence encoded by cDNA contained in Clone ID NO:Z; which method comprises a step of comparing a nucleotide sequence of at least one nucleic acid molecule in said sample with a sequence selected from said group and determining whether the sequence of said nucleic acid molecule in said sample is at least 95% identical to said selected sequence.

[0837] Also preferred is the above method wherein said step of comparing sequences comprises determining the extent of nucleic acid hybridization between nucleic acid molecules in said sample and a nucleic acid molecule comprising said sequence selected from said group. Similarly, also preferred is the above method wherein said step of comparing sequences is performed by comparing the nucleotide sequence determined from a nucleic acid molecule in said sample with said sequence selected from said group. The nucleic acid molecules can comprise DNA molecules or RNA molecules.

[0838] A further preferred embodiment is a method for identifying the species, tissue or cell type of a biological sample which method comprises a step of detecting nucleic acid molecules in said sample, if any, comprising a nucleotide sequence that is at least 95% identical to a sequence of at least 50 contiguous nucleotides in a sequence selected from the group consisting of: a nucleotide sequence of SEQ ID NO:X or the complementary strand thereto; the nucleotide sequence as defined in column 5 of Table 1A or columns 8 and 9 of Table 2 or the complementary strand thereto; and a nucleotide sequence of the cDNA contained in Clone ID NO:Z.

[0839] The method for identifying the species, tissue or cell type of a biological sample can comprise a step of detecting nucleic acid molecules comprising a nucleotide sequence in a panel of at least two nucleotide sequences, wherein at least one sequence in said panel is at least 95% identical to a sequence of at least 50 contiguous nucleotides in a sequence selected from said group.

[0840] Also preferred is a method for diagnosing in a subject a pathological condition associated with abnormal structure or expression of a nucleotide sequence of SEQ ID NO:X or the complementary strand thereto; the nucleotide sequence as defined in column 5 of Table 1A or columns 8 and 9 of Table 2 or the complementary strand thereto; or the cDNA contained in Clone ID NO:Z which encodes a protein, wherein the method comprises a step of detecting in a biological sample obtained from said subject nucleic acid molecules, if any, comprising a nucleotide sequence that is at least 95% identical to a sequence of at least 50 contiguous nucleotides in a sequence selected from the group consisting of: a nucleotide sequence of SEQ ID NO:X or the complementary strand thereto; the nucleotide sequence as defined in column 5 of Table 1A or columns 8 and 9 of Table 2 or the complementary strand thereto; and a nucleotide sequence of cDNA contained in Clone ID NO:Z.

[0841] The method for diagnosing a pathological condition can comprise a step of detecting nucleic acid molecules comprising a nucleotide sequence in a panel of at least two nucleotide sequences, wherein at least one sequence in said panel is at least 95% identical to a sequence of at least 50 contiguous nucleotides in a sequence selected from said group.

[0842] Also preferred is a composition of matter comprising isolated nucleic acid molecules wherein the nucleotide sequences of said nucleic acid molecules comprise a panel of at least two nucleotide sequences, wherein at least one sequence in said panel is at least 95% identical to a sequence of at least 50 contiguous nucleotides in a sequence selected from the group consisting of: a nucleotide sequence of SEQ ID NO:X or the complementary strand thereto; the nucleotide sequence as defined in column 5 of Table 1A or columns 8 and 9 of Table 2 or the complementary strand thereto; and a nucleotide sequence encoded by cDNA contained in Clone ID NO:Z. The nucleic acid molecules can comprise DNA molecules or RNA molecules.

[0843] Also preferred is a composition of matter comprising isolated nucleic acid molecules wherein the nucleotide sequences of said nucleic acid molecules comprise a DNA microarray or “chip” of at least 1, 2, 3, 4, 5, 6, 7, 8, 9, 10, 15, 20, 25, 30, 40, 50, 100, 150, 200, 250, 300, 500, 1000, 2000, 3000, or 4000 nucleotide sequences, wherein at least one sequence in said DNA microarray or “chip” is at least 95% identical to a sequence of at least 50 contiguous nucleotides in a sequence selected from the group consisting of: a nucleotide sequence of SEQ ID NO:X wherein X is any integer as defined in Table 1A; and a nucleotide sequence encoded by a human cDNA clone identified by a cDNA “Clone ID” in Table 1A.

[0844] Also preferred is an isolated polypeptide comprising an amino acid sequence at least 90% identical to a sequence of at least about 10 contiguous amino acids in the polypeptide sequence of SEQ ID NO:Y; a polypeptide encoded by SEQ ID NO:X or the complementary strand thereto; the polypeptide encoded by the nucleotide sequence as defined in columns 8 and 9 of Table 2; and/or a polypeptide encoded by cDNA contained in Clone ID NO:Z.

[0845] Also preferred is an isolated polypeptide comprising an amino acid sequence at least 95% identical to a sequence of at least about 30 contiguous amino acids in the amino acid sequence of SEQ ID NO:Y; a polypeptide encoded by SEQ ID NO:X or the complementary strand thereto; the polypeptide encoded by the nucleotide sequence as defined in columns 8 and 9 of Table 2; and/or a polypeptide encoded by cDNA contained in Clone ID NO:Z.

[0846] Further preferred is an isolated polypeptide comprising an amino acid sequence at least 95% identical to a sequence of at least about 100 contiguous amino acids in the amino acid sequence of SEQ ID NO:Y; a polypeptide encoded by SEQ ID NO:X or the complementary strand thereto; the polypeptide encoded by the nucleotide sequence as defined in columns 8 and 9 of Table 2; and/or a polypeptide encoded by cDNA contained in Clone ID NO:Z.

[0847] Further preferred is an isolated polypeptide comprising an amino acid sequence at least 95% identical to the complete amino acid sequence of SEQ ID NO:Y; a polypeptide encoded by SEQ ID NO:X or the complementary strand thereto; the polypeptide encoded by the nucleotide sequence as defined in columns 8 and 9 of Table 2; and/or a polypeptide encoded by cDNA contained in Clone ID NO:Z.

[0848] Further preferred is an isolated polypeptide comprising an amino acid sequence at least 90% identical to a sequence of at least about 10 contiguous amino acids in the complete amino acid sequence of a polypeptide encoded by contained in Clone ID NO:Z

[0849] Also preferred is a polypeptide wherein said sequence of contiguous amino acids is included in the amino acid sequence of a portion of said polypeptide encoded by cDNA contained in Clone ID NO:Z; a polypeptide encoded by SEQ ID NO:X or the complementary strand thereto; the polypeptide encoded by the nucleotide sequence as defined in columns 8 and 9 of Table 2; and/or the polypeptide sequence of SEQ ID NO:Y.

[0850] Also preferred is an isolated polypeptide comprising an amino acid sequence at least 95% identical to a sequence of at least about 30 contiguous amino acids in the amino acid sequence of a polypeptide encoded by the cDNA contained in Clone ID NO:Z.

[0851] Also preferred is an isolated polypeptide comprising an amino acid sequence at least 95% identical to a sequence of at least about 100 contiguous amino acids in the amino acid sequence of a polypeptide encoded by cDNA contained in Clone ID NO:Z.

[0852] Also preferred is an isolated polypeptide comprising an amino acid sequence at least 95% identical to the amino acid sequence of a polypeptide encoded by the cDNA contained in Clone ID NO:Z.

[0853] Further preferred is an isolated antibody which binds specifically to a polypeptide comprising an amino acid sequence that is at least 90% identical to a sequence of at least 10 contiguous amino acids in a sequence selected from the group consisting of: a polypeptide sequence of SEQ ID NO:Y; a polypeptide encoded by SEQ ID NO:X or the complementary strand thereto; the polypeptide encoded by the nucleotide sequence as defined in columns 8 and 9 of Table 2; and a polypeptide encoded by the cDNA contained in Clone ID NO:Z.

[0854] Further preferred is a method for detecting in a biological sample a polypeptide comprising an amino acid sequence which is at least 90% identical to a sequence of at least 10 contiguous amino acids in a sequence selected from the group consisting of: a polypeptide sequence of SEQ ID NO:Y; a polypeptide encoded by SEQ ID NO:X or the complementary strand thereto; the polypeptide encoded by the nucleotide sequence as defined in columns 8 and 9 of Table 2; and a polypeptide encoded by the cDNA contained in Clone ID NO:Z; which method comprises a step of comparing an amino acid sequence of at least one polypeptide molecule in said sample with a sequence selected from said group and determining whether the sequence of said polypeptide molecule in said sample is at least 90% identical to said sequence of at least 10 contiguous amino acids.

[0855] Also preferred is the above method wherein said step of comparing an amino acid sequence of at least one polypeptide molecule in said sample with a sequence selected from said group comprises determining the extent of specific binding of polypeptides in said sample to an antibody which binds specifically to a polypeptide comprising an amino acid sequence that is at least 90% identical to a sequence of at least 10 contiguous amino acids in a sequence selected from the group consisting of: a polypeptide sequence of SEQ ID NO:Y; a polypeptide encoded by SEQ ID NO:X or the complementary strand thereto; the polypeptide encoded by the nucleotide sequence as defined in columns 8 and 9 of Table 2; and a polypeptide encoded by the cDNA contained in Clone ID NO:Z.

[0856] Also preferred is the above method wherein said step of comparing sequences is performed by comparing the amino acid sequence determined from a polypeptide molecule in said sample with said sequence selected from said group.

[0857] Also preferred is a method for identifying the species, tissue or cell type of a biological sample which method comprises a step of detecting polypeptide molecules in said sample, if any, comprising an amino acid sequence that is at least 90% identical to a sequence of at least 10 contiguous amino acids in a sequence selected from the group consisting of: polypeptide sequence of SEQ ID NO:Y; a polypeptide encoded by SEQ ID NO:X or the complementary strand thereto; the polypeptide encoded by the nucleotide sequence as defined in columns 8 and 9 of Table 2; and a polypeptide encoded by the cDNA contained in Clone ID NO:Z.

[0858] Also preferred is the above method for identifying the species, tissue or cell type of a biological sample, which method comprises a step of detecting polypeptide molecules comprising an amino acid sequence in a panel of at least two amino acid sequences, wherein at least one sequence in said panel is at least 90% identical to a sequence of at least 10 contiguous amino acids in a sequence selected from the above group.

[0859] Also preferred is a method for diagnosing in a subject a pathological condition associated with abnormal structure or expression of a nucleic acid sequence identified in Table 1A or Table 2 encoding a polypeptide, which method comprises a step of detecting in a biological sample obtained from said subject polypeptide molecules comprising an amino acid sequence in a panel of at least two amino acid sequences, wherein at least one sequence in said panel is at least 90% identical to a sequence of at least 10 contiguous amino acids in a sequence selected from the group consisting of: polypeptide sequence of SEQ ID NO:Y; a polypeptide encoded by SEQ ID NO:X or the complementary strand thereto; the polypeptide encoded by the nucleotide sequence as defined in columns 8 and 9 of Table 2; and a polypeptide encoded by the cDNA contained in Clone ID NO:Z.

[0860] In any of these methods, the step of detecting said polypeptide molecules includes using an antibody.

[0861] Also preferred is an isolated nucleic acid molecule comprising a nucleotide sequence which is at least 95% identical to a nucleotide sequence encoding a polypeptide wherein said polypeptide comprises an amino acid sequence that is at least 90% identical to a sequence of at least 10 contiguous amino acids in a sequence selected from the group consisting of: polypeptide sequence of SEQ ID NO:Y; a polypeptide encoded by SEQ ID NO:X or the complementary strand thereto; the polypeptide encoded by the nucleotide sequence as defined in columns 8 and 9 of Table 2; and a polypeptide encoded by the cDNA contained in Clone ID NO:Z.

[0862] Also preferred is an isolated nucleic acid molecule, wherein said nucleotide sequence encoding a polypeptide has been optimized for expression of said polypeptide in a prokaryotic host.

[0863] Also preferred is a polypeptide molecule, wherein said polypeptide comprises an amino acid sequence selected from the group consisting of: polypeptide sequence of SEQ ID NO:Y; a polypeptide encoded by SEQ ID NO:X or the complementary strand thereto; the polypeptide encoded by the nucleotide sequence as defined in columns 8 and 9 of Table 2; and a polypeptide encoded by the cDNA contained in Clone ID NO:Z.

[0864] Further preferred is a method of making a recombinant vector comprising inserting any of the above isolated nucleic acid molecule into a vector. Also preferred is the recombinant vector produced by this method. Also preferred is a method of making a recombinant host cell comprising introducing the vector into a host cell, as well as the recombinant host cell produced by this method.

[0865] Also preferred is a method of making an isolated polypeptide comprising culturing this recombinant host cell under conditions such that said polypeptide is expressed and recovering said polypeptide. Also preferred is this method of making an isolated polypeptide, wherein said recombinant host cell is a eukaryotic cell and said polypeptide is a human protein comprising an amino acid sequence selected from the group consisting of: polypeptide sequence of SEQ ID NO:Y; a polypeptide encoded by SEQ ID NO:X or the complementary strand thereto; the polypeptide encoded by the nucleotide sequence as defined in columns 8 and 9 of Table 2; and a polypeptide encoded by the cDNA contained in Clone ID NO:Z. The isolated polypeptide produced by this method is also preferred.

[0866] Also preferred is a method of treatment of an individual in need of an increased level of a protein activity, which method comprises administering to such an individual a Therapeutic comprising an amount of an isolated polypeptide, polynucleotide, immunogenic fragment or analogue thereof, binding agent, antibody, or antigen binding fragment of the claimed invention effective to increase the level of said protein activity in said individual.

[0867] Also preferred is a method of treatment of an individual in need of a decreased level of a protein activity, which method comprised administering to such an individual a Therapeutic comprising an amount of an isolated polypeptide, polynucleotide, immunogenic fragment or analogue thereof, binding agent, antibody, or antigen binding fragment of the claimed invention effective to decrease the level of said protein activity in said individual.

[0868] Also preferred is a method of treatment of an individual in need of a specific delivery of toxic compositions to diseased cells (e.g., tumors, leukemias or lymphomas), which method comprises administering to such an individual a Therapeutic comprising an amount of an isolated polypeptide of the invention, including, but not limited to a binding agent, or antibody of the claimed invention that are associated with toxin or cytotoxic prodrugs.

[0869] Having generally described the invention, the same will be more readily understood by reference to the following examples, which are provided by way of illustration and are not intended as limiting.

TABLE 6

| ATCC Deposits | Deposit Date | ATCC Designation Number |
|---|---|---|
| LP01, LP02, LP03, | May-20-97 | 209059, 209060, 209061, |
| LP04, LP05, LP06, | | 209062, 209063, 209064, |
| LP07, LP08, LP09, | | 209065, 209066, 209067, |
| LP10, LP11, | | 209068, 209069 |
| LP12 | Jan-12-98 | 209579 |
| LP13 | Jan-12-98 | 209578 |
| LP14 | Jul-16-98 | 203067 |
| LP15 | Jul-16-98 | 203068 |
| LP16 | Feb-1-99 | 203609 |
| LP17 | Feb-1-99 | 203610 |
| LP20 | Nov-17-98 | 203485 |
| LP21 | Jun-18-99 | PTA-252 |
| LP22 | Jun-18-99 | PTA-253 |
| LP23 | Dec-22-99 | PTA-1081 |

### EXAMPLES

### Example 1

### Isolation of a Selected cDNA Clone from the Deposited Sample

[0870] Each Clone ID NO:Z is contained in a plasmid vector. Table 7 identifies the vectors used to construct the cDNA library from which each clone was isolated. In many cases, the vector used to construct the library is a phage vector from which a plasmid has been excised. The following correlates the related plasmid for each phage vector used in constructing the cDNA library. For example, where a particular clone is identified in Table 7 as being isolated in the vector “Lambda Zap,” the corresponding deposited clone is in “pBluescript.”

| Vector Used to Construct Library | Corresponding Deposited Plasmid |
|---|---|
| Lambda Zap | pBluescript (pBS) |
| Uni-Zap XR | pBluescript (pBS) |
| Zap Express | pBK |
| lafmid BA | plafMid BA |
| pSport1 | pSport1 |
| pCMVSport 2.0 | pCMVSport 2.0 |
| pCMVSport 3.0 | pCMVSport 3.0 |
| pCR ® 2.1 | pCR ® 2.1 |

[0871] Vectors Lambda Zap (U.S. Pat. Nos. 5,128,256 and 5,286,636), Uni-Zap XR (U.S. Pat. Nos. 5,128, 256 and 5,286,636), Zap Express (U.S. Pat. Nos. 5,128,256 and 5,286,636), pBluescript (pBS) (Short, J. M. et al., Nucleic Acids Res. 16:7583-7600 (1988); Alting-Mees, M. A. and Short, J. M., Nucleic Acids Res. 17:9494 (1989)) and pBK (Alting-Mees, M. A. et al., Strategies 5:58-61 (1992)) are commercially available from Stratagene Cloning Systems, Inc., 11011 N. Torrey Pines Road, La Jolla, Calif., 92037. pBS contains an ampicillin resistance gene and pBK contains a neomycin resistance gene. Both can be transformed into E. coli strain XL-1 Blue, also available from Stratagene. pBS comes in 4 forms SK+, SK−, KS+ and KS. The S and K refers to the orientation of the polylinker to the T7 and T3 primer sequences which flank the polylinker region (“S” is for SacI and “K” is for KpnI which are the first sites on each respective end of the linker). “+” or “−” refer to the orientation of the fl origin of replication (“ori”), such that in one orientation, single stranded rescue initiated from the fl ori generates sense strand DNA and in the other, antisense.

[0872] Vectors pSport1, pCMVSport 2.0 and pCMVSport 3.0, were obtained from Life Technologies, Inc., P. O. Box 6009, Gaithersburg, Md. 20897. All Sport vectors contain an ampicillin resistance gene and may be transformed into E. coli strain DH10B, also available from Life Technologies. (See, for instance, Gruber, C. E., et al., Focus 15:59 (1993)). Vector lafmid BA (Bento Soares, Columbia University, NY) contains an ampicillin resistance gene and can be transformed into E. coli strain XL-1 Blue. Vector pCR®2.1, which is available from Invitrogen, 1600 Faraday Avenue, Carlsbad, Calif. 92008, contains an ampicillin resistance gene and may be transformed into E. coli strain DH10B, available from Life Technologies. (See, for instance, Clark, J. M., Nuc. Acids Res. 16:9677-9686 (1988) and Mead, D. et al., Bio/Technology 9: (1991)). Preferably, a polynucleotide of the present invention does not comprise the phage vector sequences identified for the particular clone in Table 7, as well as the corresponding plasmid vector sequences designated above.

[0873] The deposited material in the sample assigned the ATCC Deposit Number cited by reference to Tables 1, 2, 6 and 7 for any given cDNA clone also may contain one or more additional plasmids, each comprising a cDNA clone different from that given clone. Thus, deposits sharing the same ATCC Deposit Number contain at least a plasmid for each Clone ID NO:Z.

TABLE 7

| | | | ATCC |
|---|---|---|---|
| Libraries owned by Catalog | Catalog Description | Vector | Deposit |
| HUKA HUKB HUKC HUKD HUKE | Human Uterine Cancer | Lambda ZAP II | LP01 |
| HUKF HUKG | | | |
| HCNA HCNB | Human Colon | Lambda Zap II | LP01 |
| HFFA | Human Fetal Brain, random primed | Lambda Zap II | LP01 |
| HTWA | Resting T-Cell | Lambda ZAP II | LP01 |
| HBQA | Early Stage Human Brain, random | Lambda ZAP II | LP01 |
| | primed | | |
| HLMB HLMF HLMG HLMH HLMI | breast lymph node CDNA library | Lambda ZAP II | LP01 |
| HLMJ HLMM HLMN | | | |
| HCQA HCQB | human colon cancer | Lamda ZAP II | LP01 |
| HMEA HMEC HMED HMEE HMEF | Human Microvascular Endothelial | Lambda ZAP II | LP01 |
| HMEG HMEI HMEJ HMEK HMEL | Cells, fract. A | | |
| HUSA HUSC | Human Umbilical Vein Endothelial | Lambda ZAP II | LP01 |
| | Cells, fract. A | | |
| HLQA HLQB | Hepatocellular Tumor | Lambda ZAP II | LP01 |
| HHGA HHGB HHGC HHGD | Hemangiopericytoma | Lambda ZAP II | LP01 |
| HSDM | Human Striatum Depression, re- | Lambda ZAP II | LP01 |
| | rescue | | |
| HUSH | H Umbilical Vein Endothelial Cells, | Lambda ZAP II | LP01 |
| | frac A, re-excision | | |
| HSGS | Salivary gland, subtracted | Lambda ZAP II | LP01 |
| HFXA HFXB HFXC HFXD HFXE | Brain frontal cortex | Lambda ZAP II | LP01 |
| HFXF HFXG HFXH | | | |
| HPQA HPQB HPQC | PERM TF274 | Lambda ZAP II | LP01 |
| HFXJ HFXK | Brain Frontal Cortex, re-excision | Lambda ZAP II | LP01 |
| HCWA HCWB HCWC HCWD HCWE | CD34 positive cells (Cord Blood) | ZAP Express | LP02 |
| HCWF HCWG HCWH HCWI HCWJ | | | |
| HCWK | | | |
| HCUA HCUB HCUC | CD34 depleted Buffy Coat (Cord | ZAP Express | LP02 |
| | Blood) | | |
| HRSM | A-14 cell line | ZAP Express | LP02 |
| HRSA | A1-CELL LINE | ZAP Express | LP02 |
| HCUD HCUE HCUF HCUG HCUH | CD34 depleted Buffy Coat (Cord | ZAP Express | LP02 |
| HCUI | Blood), re-excision | | |
| HBXE HBXF HBXG | H. Whole Brain #2, re-excision | ZAP Express | LP02 |
| HRLM | L8 cell line | ZAP Express | LP02 |
| HBXA HBXB HBXC HBXD | Human Whole Brain #2 - Oligo dT > | ZAP Express | LP02 |
| | 1.5 Kb | | |
| HUDA HUDB HUDC | Testes | ZAP Express | LP02 |
| HHTM HHTN HHTO | H. hypothalamus, frac A, re-excision | ZAP Express | LP02 |
| HHTL | H. hypothalamus, frac A | ZAP Express | LP02 |
| HASA HASD | Human Adult Spleen | Uni-ZAP XR | LP03 |
| HFKC HFKD HFKE HFKF HFKG | Human Fetal Kidney | Uni-ZAP XR | LP03 |
| HE8A HE8B HE8C HE8D HE8E HE8F | Human 8 Week Whole Embryo | Uni-ZAP XR | LP03 |
| HE8M HE8N | | | |
| HGBA HGBD HGBE HGBF HGBG | Human Gall Bladder | Uni-ZAP XR | LP03 |
| HGBH HGBI | | | |
| HLHA HLHB HLHC HLHD HLHE | Human Fetal Lung III | Uni-ZAP XR | LP03 |
| HLHF HLHG HLHH HLHQ | | | |
| HPMA HPMB HPMC HPMD HPME | Human Placenta | Uni-ZAP XR | LP03 |
| HPMF HPMG HPMH | | | |
| HPRA HPRB HPRC HPRD | Human Prostate | Uni-ZAP XR | LP03 |
| HSIA HSIC HSID HSIE | Human Adult Small Intestine | Uni-ZAP XR | LP03 |
| HTEA HTEB HTEC HTED HTEE | Human Testes | Uni-ZAP XR | LP03 |
| HTEF HTEG HTEH HTEI HTEJ HTEK | | | |
| HTPA HTPB HTPC HTPD HTPE | Human Pancreas Tumor | Uni-ZAP XR | LP03 |
| HTTA HTTB HTTC HTTD HTTE | Human Testes Tumor | Uni-ZAP XR | LP03 |
| HTTF | | | |
| HAPA HAPB HAPC HAPM | Human Adult Pulmonary | Uni-ZAP XR | LP03 |
| HETA HETB HETC HETD HETE | Human Endometrial Tumor | Uni-ZAP XR | LP03 |
| HETF HETG HETH HETI | | | |
| HHFB HHFC HHFD HHFE HHFF | Human Fetal Heart | Uni-ZAP XR | LP03 |
| HHFG HHFH HHFI | | | |
| HHPB HHPC HHPD HHPE HHPF | Human Hippocampus | Uni-ZAP XR | LP03 |
| HHPG HHPH | | | |
| HCE1 HCE2 HCE3 HCE4 HCE5 HCEB | Human Cerebellum | Uni-ZAP XR | LP03 |
| HCEC HCED HCEE HCEF HCEG | | | |
| HUVB HUVC HUVD HUVE | Human Umbilical Vein, Endo. | Uni-ZAP XR | LP03 |
| | remake | | |
| HSTA HSTB HSTC HSTD | Human Skin Tumor | Uni-ZAP XR | LP03 |
| HTAA HTAB HTAC HTAD HTAE | Human Activated T-Cells | Uni-ZAP XR | LP03 |
| HFEA HFEB HFEC | Human Fetal Epithelium (Skin) | Uni-ZAP XR | LP03 |
| HJPA HJPB HJPC HJPD | HUMAN JURKAT MEMBRANE | Uni-ZAP XR | LP03 |
| | BOUND POLYSOMES | | |
| HESA | Human epithelioid sarcoma | Uni-Zap XR | LP03 |
| HLTA HLTB HLTC HLTD HLTE | Human T-Cell Lymphoma | Uni-ZAP XR | LP03 |
| HLTF | | | |
| HFTA HFTB HFTC HFTD | Human Fetal Dura Mater | Uni-ZAP XR | LP03 |
| HRDA HRDB HRDC HRDD HRDE | Human Rhabdomyosarcoma | Uni-ZAP XR | LP03 |
| HRDF | | | |
| HCAA HCAB HCAC | Cem cells cyclohexamide treated | Uni-ZAP XR | LP03 |
| HRGA HRGB HRGC HRGD | Raji Cells, cyclohexamide treated | Uni-ZAP XR | LP03 |
| HSUA HSUB HSUC HSUM | Supt Cells, cyclohexamide treated | Uni-ZAP XR | LP03 |
| HT4A HT4C HT4D | Activated T-Cells, 12 hrs. | Uni-ZAP XR | LP03 |
| HE9A HE9B HE9C HE9D HE9E HE9F | Nine Week Old Early Stage Human | Uni-ZAP XR | LP03 |
| HE9G HE9H HE9M HE9N | | | |
| HATA HATB HATC HATD HATE | Human Adrenal Gland Tumor | Uni-ZAP XR | LP03 |
| HT5A | Activated T-Cells, 24 hrs. | Uni-ZAP XR | LP03 |
| HFGA HFGM | Human Fetal Brain | Uni-ZAP XR | LP03 |
| HNEA HNEB HNEC HNED HNEE | Human Neutrophil | Uni-ZAP XR | LP03 |
| HBGB HBGD | Human Primary Breast Cancer | Uni-ZAP XR | LP03 |
| HBNA HBNB | Human Normal Breast | Uni-ZAP XR | LP03 |
| HCAS | Cem Cells, cyclohexamide treated, | Uni-ZAP XR | LP03 |
| | subtra | | |
| HHPS | Human Hippocampus, subtracted | pBS | LP03 |
| HKCS HKCU | Human Colon Cancer, subtracted | pBS | LP03 |
| HRGS | Raji cells, cyclohexamide treated, | pBS | LP03 |
| | subtracted | | |
| HSUT | Supt cells, cyclohexamide treated, | pBS | LP03 |
| | differentially expressed | | |
| HT4S | Activated T-Cells, 12 hrs, subtracted | Uni-ZAP XR | LP03 |
| HCDA HCDB HCDC HCDD HCDE | Human Chondrosarcoma | Uni-ZAP XR | LP03 |
| HOAA HOAB HOAC | Human Osteosarcoma | Uni-ZAP XR | LP03 |
| HTLA HTLB HTLC HTLD HTLE | Human adult testis, large inserts | Uni-ZAP XR | LP03 |
| HTLF | | | |
| HLMA HLMC HLMD | Breast Lymph node cDNA library | Uni-ZAP XR | LP03 |
| H6EA H6EB H6EC | HL-60, PMA 4H | Uni-ZAP XR | LP03 |
| HTXA HTXB HTXC HTXD HTXE | Activated T-Cell (12 hs)/Thiouridine | Uni-ZAP XR | LP03 |
| HTXF HTXG HTXH | labelledEco | | |
| HNFA HNFB HNFC HNFD HNFE | Human Neutrophil, Activated | Uni-ZAP XR | LP03 |
| HNFF HNFG HNFH HNFJ | | | |
| HTOB HTOC | HUMAN TONSILS, FRACTION 2 | Uni-ZAP XR | LP03 |
| HMGB | Human OB MG63 control fraction I | Uni-ZAP XR | LP03 |
| HOPB | Human OB HOS control fraction I | Uni-ZAP XR | LP03 |
| HORB | Human OB HOS treated (10 nM E2) | Uni-ZAP XR | LP03 |
| | fraction I | | |
| HSVA HSVB HSVC | Human Chronic Synovitis | Uni-ZAP XR | LP03 |
| HROA | HUMAN STOMACH | Uni-ZAP XR | LP03 |
| HBJA HBJB HBJC HBJD HBJE HBJF | HUMAN B CELL LYMPHOMA | Uni-ZAP XR | LP03 |
| HBJG HBJH HBJI HBJJ HBJK | | | |
| HCRA HCRB HCRC | human corpus colosum | Uni-ZAP XR | LP03 |
| HODA HODB HODC HODD | human ovarian cancer | Uni-ZAP XR | LP03 |
| HDSA | Dermatofibrosarcoma Protuberance | Uni-ZAP XR | LP03 |
| HMWA HMWB HMWC HMWD | Bone Marrow Cell Line (RS4, 11) | Uni-ZAP XR | LP03 |
| HMWE HMWF HMWG HMWH | | | |
| HMWI HMWJ | | | |
| HSOA | stomach cancer (human) | Uni-ZAP XR | LP03 |
| HERA | SKIN | Uni-ZAP XR | LP03 |
| HMDA | Brain-medulloblastoma | Uni-ZAP XR | LP03 |
| HGLA HGLB HGLD | Glioblastoma | Uni-ZAP XR | LP03 |
| HEAA | H. Atrophic Endometrium | Uni-ZAP XR | LP03 |
| HBCA HBCB | H. Lymph node breast Cancer | Uni-ZAP XR | LP03 |
| HPWT | Human Prostate BPH, re-excision | Uni-ZAP XR | LP03 |
| HFVG HFVH HFVI | Fetal Liver, subtraction II | pBS | LP03 |
| HNFI | Human Neutrophils, Activated, re- | pBS | LP03 |
| | excision | | |
| HBMB HBMC HBMD | Human Bone Marrow, re-excision | pBS | LP03 |
| HKML HKMM HKMN | H. Kidney Medulla, re-excision | pBS | LP03 |
| HKIX HKIY | H. Kidney Cortex, subtracted | pBS | LP03 |
| HADT | H. Amygdala Depression, subtracted | pBS | LP03 |
| H6AS | HI-60, untreated, subtracted | Uni-ZAP XR | LP03 |
| H6ES | HL-60, PMA 4 H, subtracted | Uni-ZAP XR | LP03 |
| H6BS | HL-60, RA 4 h, Subtracted | Uni-ZAP XR | LP03 |
| H6CS | HL-60, PMA 1d, subtracted | Uni-ZAP XR | LP03 |
| HTXJ HTXK | Activated T-cell(12 h)/Thiouridine-re- | Uni-ZAP XR | LP03 |
| | excision | | |
| HMSA HMSB HMSC HMSD HMSE | Monocyte activated | Uni-ZAP XR | LP03 |
| HMSF HMSG HMSH HMSI HMSJ | | | |
| HMSK | | | |
| HAGA HAGB HAGC HAGD HAGE | Human Amygdala | Uni-ZAP XR | LP03 |
| HAGF | | | |
| HSRA HSRB HSRE | STROMAL-OSTEOCLASTOMA | Uni-ZAP XR | LP03 |
| HSRD HSRF HSRG HSRH | Human Osteoclastoma Stromal Cells - | Uni-ZAP XR | LP03 |
| | unamplified | | |
| HSQA HSQB HSQC HSQD HSQE | Stromal cell TF274 | Uni-ZAP XR | LP03 |
| HSQF HSQG | | | |
| HSKA HSKB HSKC HSKD HSKE | Smooth muscle, serum treated | Uni-ZAP XR | LP03 |
| HSKF HSKZ | | | |
| HSLA HSLB HSLC HSLD HSLE HSLF | Smooth muscle, control | Uni-ZAP XR | LP03 |
| HSLG | | | |
| HSDA HSDD HSDE HSDF HSDG | Spinal cord | Uni-ZAP XR | LP03 |
| HSDH | | | |
| HPWS | Prostate-BPH subtracted II | pBS | LP03 |
| HSKW HSKX HSKY | Smooth Muscle-HASTE normalized | pBS | LP03 |
| HFPB HFPC HFPD | H. Frontal cortex, epileptic; re-excision | Uni-ZAP XR | LP03 |
| HSDI HSDJ HSDK | Spinal Cord, re-excision | Uni-ZAP XR | LP03 |
| HSKN HSKO | Smooth Muscle Serum Treated, Norm | pBS | LP03 |
| HSKG HSKH HSKI | Smooth muscle, serum induced, re-exc | pBS | LP03 |
| HFCA HFCB HFCC HFCD HFCE | Human Fetal Brain | Uni-ZAP XR | LP04 |
| HFCF | | | |
| HPTA HPTB HPTD | Human Pituitary | Uni-ZAP XR | LP04 |
| HTHB HTHC HTHD | Human Thymus | Uni-ZAP XR | LP04 |
| HE6B HE6C HE6D HE6E HE6F HE6G | Human Whole Six Week Old Embryo | Uni-ZAP XR | LP04 |
| HE6S | | | |
| HSSA HSSB HSSC HSSD HSSE HSSF | Human Synovial Sarcoma | Uni-ZAP XR | LP04 |
| HSSG HSSH HSSI HSSJ HSSK | | | |
| HE7T | 7 Week Old Early Stage Human, | Uni-ZAP XR | LP04 |
| | subtracted | | |
| HEPA HEPB HEPC | Human Epididymus | Uni-ZAP XR | LP04 |
| HSNA HSNB HSNC HSNM HSNN | Human Synovium | Uni-ZAP XR | LP04 |
| HPFB HPFC HPFD HPFE | Human Prostate Cancer, Stage C | Uni-ZAP XR | LP04 |
| | fraction | | |
| HE2A HE2D HE2E HE2H HE2I HE2M | 12 Week Old Early Stage Human | Uni-ZAP XR | LP04 |
| HE2N HE2O | | | |
| HE2B HE2C HE2F HE2G HE2P HE2Q | 12 Week Old Early Stage Human, II | Uni-ZAP XR | LP04 |
| HPTS HPTT HPTU | Human Pituitary, subtracted | Uni-ZAP XR | LP04 |
| HAUA HAUB HAUC | Amniotic Cells - TNF induced | Uni-ZAP XR | LP04 |
| HAQA HAQB HAQC HAQD | Amniotic Cells - Primary Culture | Uni-ZAP XR | LP04 |
| HWTA HWTB HWTC | wilm's tumor | Uni-ZAP XR | LP04 |
| HBSD | Bone Cancer, re-excision | Uni-ZAP XR | LP04 |
| HSGB | Salivary gland, re-excision | Uni-ZAP XR | LP04 |
| HSJA HSJB HSJC | Smooth muscle-ILb induced | Uni-ZAP XR | LP04 |
| HSXA HSXB HSXC HSXD | Human Substantia Nigra | Uni-ZAP XR | LP04 |
| HSHA HSHB HSHC | Smooth muscle, IL1b induced | Uni-ZAP XR | LP04 |
| HOUA HOUB HOUC HOUD HOUE | Adipocytes | Uni-ZAP XR | LP04 |
| HPWA HPWB HPWC HPWD HPWE | Prostate BPH | Uni-ZAP XR | LP04 |
| HELA HELB HELC HELD HELE | Endothelial cells-control | Uni-ZAP XR | LP04 |
| HELF HELG HELH | | | |
| HEMA HEMB HEMC HEMD HEME | Endothelial-induced | Uni-ZAP XR | LP04 |
| HEMF HEMG HEMH | | | |
| HBIA HBIB HBIC | Human Brain, Striatum | Uni-ZAP XR | LP04 |
| HHSA HHSB HHSC HHSD HHSE | Human Hypothalmus, Schizophrenia | Uni-ZAP XR | LP04 |
| HNGA HNGB HNGC HNGD HNGE | neutrophils control | Uni-ZAP XR | LP04 |
| HNGF HNGG HNGH HNGI HNGJ | | | |
| HNHA HNHB HNHC HNHD HNHE | Neutrophils IL-1 and LPS induced | Uni-ZAP XR | LP04 |
| HNHF HNHG HNHH HNHI HNHJ | | | |
| HSDB HSDC | STRIATUM DEPRESSION | Uni-ZAP XR | LP04 |
| HHPT | Hypothalamus | Uni-ZAP XR | LP04 |
| HSAT HSAU HSAV HSAW HSAX | Anergic T-cell | Uni-ZAP XR | LP04 |
| HSAY HSAZ | | | |
| HBMS HBMT HBMU HBMV HBMW | Bone marrow | Uni-ZAP XR | LP04 |
| HBMX | | | |
| HOEA HOEB HOEC HOED HOEE | Osteoblasts | Uni-ZAP XR | LP04 |
| HOEF HOEJ | | | |
| HAIA HAIB HAIC HAID HAIE HAIF | Epithelial-TNFa and INF induced | Uni-ZAP XR | LP04 |
| HTGA HTGB HTGC HTGD | Apoptotic T-cell | Uni-ZAP XR | LP04 |
| HMCA HMCB HMCC HMCD HMCE | Macrophage-oxLDL | Uni-ZAP XR | LP04 |
| HMAA HMAB HMAC HMAD HMAE | Macrophage (GM-CSF treated) | Uni-ZAP XR | LP04 |
| HMAF HMAG | | | |
| HPHA | Normal Prostate | Uni-ZAP XR | LP04 |
| HPIA HPIB HPIC | LNCAP prostate cell line | Uni-ZAP XR | LP04 |
| HPJA HPJB HPJC | PC3 Prostate cell line | Uni-ZAP XR | LP04 |
| HOSE HOSF HOSG | Human Osteoclastoma, re-excision | Uni-ZAP XR | LP04 |
| HTGE HTGF | Apoptotic T-cell, re-excision | Uni-ZAP XR | LP04 |
| HMAJ HMAK | H Macrophage (GM-CSF treated), re- | Uni-ZAP XR | LP04 |
| | excision | | |
| HACB HACC HACD | Human Adipose Tissue, re-excision | Uni-ZAP XR | LP04 |
| HFPA | H. Frontal Cortex, Epileptic | Uni-ZAP XR | LP04 |
| HFAA HFAB HFAC HFAD HFAE | Alzheimer's, spongy change | Uni-ZAP XR | LP04 |
| HFAM | Frontal Lobe, Dementia | Uni-ZAP XR | LP04 |
| HMIA HMIB HMIC | Human Manic Depression Tissue | Uni-ZAP XR | LP04 |
| HTSA HTSE HTSF HTSG HTSH | Human Thymus | pBS | LP05 |
| HPBA HPBB HPBC HPBD HPBE | Human Pineal Gland | pBS | LP05 |
| HSAA HSAB HSAC | HSA 172 Cells | pBS | LP05 |
| HSBA HSBB HSBC HSBM | HSC172 cells | pBS | LP05 |
| HJAA HJAB HJAC HJAD | Jurkat T-cell G1 phase | pBS | LP05 |
| HJBA HJBB HJBC HJBD | Jurkat T-Cell, S phase | pBS | LP05 |
| HAFA HAFB | Aorta endothelial cells + TNF-a | pBS | LP05 |
| HAWA HAWB HAWC | Human White Adipose | pBS | LP05 |
| HTNA HTNB | Human Thyroid | pBS | LP05 |
| HONA | Normal Ovary, Premenopausal | pBS | LP05 |
| HARA HARB | Human Adult Retina | pBS | LP05 |
| HLJA HLJB | Human Lung | pCMVSport 1 | LP06 |
| HOFM HOFN HOFO | H. Ovarian Tumor, II, OV5232 | pCMVSport 2.0 | LP07 |
| HOGA HOGB HOGC | OV 10-3-95 | pCMVSport 2.0 | LP07 |
| HCGL | CD34+cells, II | pCMVSport 2.0 | LP07 |
| HDLA | Hodgkin's Lymphoma I | pCMVSport 2.0 | LP07 |
| HDTA HDTB HDTC HDTD HDTE | Hodgkin's Lymphoma II | pCMVSport 2.0 | LP07 |
| HKAA HKAB HKAC HKAD HKAE | Keratinocyte | pCMVSport 2.0 | LP07 |
| HKAF HKAG HKAH | | | |
| HCIM | CAPFINDER, Crohn's Disease, lib 2 | pCMVSport 2.0 | LP07 |
| HKAL | Keratinocyte, lib 2 | pCMVSport 2.0 | LP07 |
| HKAT | Keratinocyte, lib 3 | pCMVSport 2.0 | LP07 |
| HNDA | Nasal polyps | pCMVSport 2.0 | LP07 |
| HDRA | H. Primary Dendritic Cells, lib 3 | pCMVSport 2.0 | LP07 |
| HOHA HOHB HOHC | Human Osteoblasts II | pCMVSport 2.0 | LP07 |
| HLDA HLDB HLDC | Liver, Hepatoma | pCMVSport 3.0 | LP08 |
| HLDN HLDO HLDP | Human Liver, normal | pCMVSport 3.0 | LP08 |
| HMTA | pBMC stimulated w/poly I/C | pCMVSport 3.0 | LP08 |
| HNTA | NTERA2, control | pCMVSport 3.0 | LP08 |
| HDPA HDPB HDPC HDPD HDPF | Primary Dendritic Cells, lib 1 | pCMVSport 3.0 | LP08 |
| HDPG HDPH HDPI HDPJ HDPK | | | |
| HDPM HDPN HDPO HDPP | Primary Dendritic cells, frac 2 | pCMVSport 3.0 | LP08 |
| HMUA HMUB HMUC | Myoloid Progenitor Cell Line | pCMVSport 3.0 | LP08 |
| HHEA HHEB HHEC HHED | T Cell helper I | pCMVSport 3.0 | LP08 |
| HHEM HHEN HHEO HHEP | T cell helper II | pCMVSport 3.0 | LP08 |
| HEQA HEQB HEQC | Human endometrial stromal cells | pCMVSport 3.0 | LP08 |
| HJMA HJMB | Human endometrial stromal cells- | pCMVSport 3.0 | LP08 |
| | treated with progesterone | | |
| HSWA HSWB HSWC | Human endometrial stromal cells- | pCMVSport 3.0 | LP08 |
| | treated with estradiol | | |
| HSYA HSYB HSYC | Human Thymus Stromal Cells | pCMVSport 3.0 | LP08 |
| HLWA HLWB HLWC | Human Placenta | pCMVSport 3.0 | LP08 |
| HRAA HRAB HRAC | Rejected Kidney, lib 4 | pCMVSport 3.0 | LP08 |
| HMTM | PCR, pBMC I/C treated | PCRII | LP09 |
| HMJA | H. Meniingima, M6 | pSport 1 | LP10 |
| HMKA HMKB HMKC HMKD HMKE | H Meningima, M1 | pSport 1 | LP10 |
| HUSG HUSI | Human umbilical vein endothelial | pSport 1 | LP10 |
| | cells, IL-4 induced | | |
| HUSX HUSY | Human Umbilical Vein Endothelial | pSport 1 | LP10 |
| | Cells, uninduced | | |
| HOFA | Ovarian Tumor I, OV5232 | pSport 1 | LP10 |
| HCFA HCFB HCFC HCFD | T-Cell PHA 16 hrs | pSport 1 | LP10 |
| HCFL HCFM HCFN HCFO | T-Cell PHA 24 hrs | pSport 1 | LP10 |
| HADA HADC HADD HADE HADF | Human Adipose | pSport 1 | LP10 |
| HADG | | | |
| HOVA HOVB HOVC | Human Ovary | pSport 1 | LP10 |
| HTWB HTWC HTWD HTWE HTWF | Resting T-Cell Library, II | pSport 1 | LP10 |
| HMMA | Spleen metastic melanoma | pSport 1 | LP10 |
| HLYA HLYB HLYC HLYD HLYE | Spleen, Chronic lymphocytic | pSport 1 | LP10 |
| | leukemia | | |
| HCGA | CD34+cell, I | pSport 1 | LP10 |
| HEOM HEON | Human Eosinophils | pSport 1 | LP10 |
| HTDA | Human Tonsil, Lib 3 | pSport 1 | LP10 |
| HSPA | Salivary Gland, Lib 2 | pSport 1 | LP10 |
| HCHA HCHB HCHC | Breast Cancer cell line, MDA 36 | pSport 1 | LP10 |
| HCHM HCHN | Breast Cancer Cell line, angiogenic | pSport 1 | LP10 |
| HCIA | Crohn's Disease | pSport 1 | LP10 |
| HDAA HDAB HDAC | HEL cell line | pSport 1 | LP10 |
| HABA | Human Astrocyte | pSport 1 | LP10 |
| HUFA HUFB HUFC | Ulcerative Colitis | pSport 1 | LP10 |
| HNTM | NTERA2 + retinoic acid, 14 days | pSport 1 | LP10 |
| HDQA | Primary Dendritic cells, CapFinder2, | pSport 1 | LP10 |
| | frac 1 | | |
| HDQM | Primary Dendritic Cells, CapFinder, | pSport 1 | LP10 |
| | frac 2 | | |
| HLDX | Human Liver, normal, CapFinder | pSport 1 | LP10 |
| HULA HULB HULC | Human Dermal Endothelial | pSport 1 | LP10 |
| | Cells, untreated | | |
| HUMA | Human Dermal Endothelial | pSport 1 | LP10 |
| | cells, treated | | |
| HCJA | Human Stromal Endometrial | pSport 1 | LP10 |
| | fibroblasts, untreated | | |
| HCJM | Human Stromal endometrial | pSport 1 | LP10 |
| | fibroblasts, treated w/estradiol | | |
| HEDA | Human Stromal endometrial | pSport 1 | LP10 |
| | fibroblasts, treated with progesterone | | |
| HFNA | Human ovary tumor cell OV350721 | pSport 1 | LP10 |
| HKGA HKGB HKGC HKGD | Merkel Cells | pSport 1 | LP10 |
| HISA HISB HISC | Pancreas Islet Cell Tumor | pSport 1 | LP10 |
| HLSA | Skin, burned | pSport 1 | LP10 |
| HBZA | Prostate, BPH, Lib 2 | pSport 1 | LP10 |
| HBZS | Prostate BPH, Lib 2, subtracted | pSport 1 | LP10 |
| HFIA HFIB HFIC | Synovial Fibroblasts (control) | pSport 1 | LP10 |
| HFIH HFII HFIJ | Synovial hypoxia | pSport 1 | LP10 |
| HFIT HFIU HFIV | Synovial IL-1/TNF stimulated | pSport 1 | LP10 |
| HGCA | Messangial cell, frac 1 | pSport 1 | LP10 |
| HMVA HMVB HMVC | Bone Marrow Stromal Cell, untreated | pSport 1 | LP10 |
| HFIX HFIY HFIZ | Synovial Fibroblasts (III/TNF), subt | pSport 1 | LP10 |
| HFOX HFOY HFOZ | Synovial hypoxia-RSF subtracted | pSport 1 | LP10 |
| HMQA HMQB HMQC HMQD | Human Activated Monocytes | Uni-ZAP XR | LP11 |
| HLIA HLIB HLIC | Human Liver | pCMVSport 1 | LP012 |
| HHBA HHBB HHBC HHBD HHBE | Human Heart | pCMVSport 1 | LP012 |
| HBBA HBBB | Human Brain | pCMVSport 1 | LP012 |
| HLJA HLJB HLJC HLJD HLJE | Human Lung | pCMVSport 1 | LP012 |
| HOGA HOGB HOGC | Ovarian Tumor | pCMVSport 2.0 | LP012 |
| HTJM | Human Tonsils, Lib 2 | pCMVSport 2.0 | LP012 |
| HAMF HAMG | KMH2 | pCMVSport 3.0 | LP012 |
| HAJA HAJB HAJC | L428 | pCMVSport 3.0 | LP012 |
| HWBA HWBB HWBC HWBD HWBE | Dendritic cells, pooled | pCMVSport 3.0 | LP012 |
| HWAA HWAB HWAC HWAD HWAE | Human Bone Marrow, treated | pCMVSport 3.0 | LP012 |
| HYAA HYAB HYAC | B Cell lymphoma | pCMVSport 3.0 | LP012 |
| HWHG HWHH HWHI | Healing groin wound, 6.5 hours post | pCMVSport 3.0 | LP012 |
| | incision | | |
| HWHP HWHQ HWHR | Healing groin wound, 7.5 hours post | pCMVSport 3.0 | LP012 |
| | incision | | |
| HARM | Healing groin wound - zero hr post- | pCMVSport 3.0 | LP012 |
| | incision (control) | | |
| HBIM | Olfactory epithelium, nasalcavity | pCMVSport 3.0 | LP012 |
| HWDA | Healing Abdomen wound; 70&90 | pCMVSport 3.0 | LP012 |
| | min post incision | | |
| HWEA | Healing Abdomen Wound; 15 days | pCMVSport 3.0 | LP012 |
| | post incision | | |
| HWJA | Healing Abdomen Wound; 21&29 | pCMVSport 3.0 | LP012 |
| | days | | |
| HNAL | Human Tongue, frac 2 | pSport 1 | LP012 |
| HMJA | H. Meniingima, M6 | pSport 1 | LP012 |
| HMKA HMKB HMKC HMKD HMKE | H. Meningima, M1 | pSport 1 | LP012 |
| HOFA | Ovarian Tumor I, OV5232 | pSport 1 | LP012 |
| HCFA HCFB HCFC HCFD | T-Cell PHA 16 hrs | pSport 1 | LP012 |
| HCFL HCFM HCFN HCFO | T-Cell PHA 24 hrs | pSport 1 | LP012 |
| HMMA HMMB HMMC | Spleen metastic melanoma | pSport 1 | LP012 |
| HTDA | Human Tonsil, Lib 3 | pSport 1 | LP012 |
| HDBA | Human Fetal Thymus | pSport 1 | LP012 |
| HDUA | Pericardium | pSport 1 | LP012 |
| HBZA | Prostate, BPH, Lib 2 | pSport 1 | LP012 |
| HWCA | Larynx tumor | pSport 1 | LP012 |
| HWKA | Normal lung | pSport 1 | LP012 |
| HSMB | Bone marrow stroma, treated | pSport 1 | LP012 |
| HBHM | Normal trachea | pSport 1 | LP012 |
| HLFC | Human Larynx | pSport 1 | LP012 |
| HLRB | Siebben Polyposis | pSport 1 | LP012 |
| HNIA | Mammary Gland | pSport 1 | LP012 |
| HNJB | Palate carcinoma | pSport 1 | LP012 |
| HNKA | Palate normal | pSport 1 | LP012 |
| HMZA | Pharynx carcinoma | pSport 1 | LP012 |
| HABG | Cheek Carcinoma | pSport 1 | LP012 |
| HMZM | Pharynx Carcinoma | pSport 1 | LP012 |
| HDRM | Larynx Carcinoma | pSport 1 | LP012 |
| HVAA | Pancreas normal PCA4 No | pSport 1 | LP012 |
| HICA | Tongue carcinoma | pSport 1 | LP012 |
| HUKA HUKB HUKC HUKD HUKE | Human Uterine Cancer | Lambda ZAP II | LP013 |
| HFFA | Human Fetal Brain, random primed | Lambda ZAP II | LP013 |
| HTUA | Activated T-cell labeled with 4- | Lambda ZAP II | LP013 |
| | thioluri | | |
| HBQA | Early Stage Human Brain, random | Lambda ZAP II | LP013 |
| | primed | | |
| HMEB | Human microvascular Endothelial | Lambda ZAP II | LP013 |
| | cells, fract. B | | |
| HUSH | Human Umbilical Vein Endothelial | Lambda ZAP II | LP013 |
| | cells, fract. A, re-excision | | |
| HLQC HLQD | Hepatocellular tumor, re-excision | Lambda ZAP II | LP013 |
| HTWJ HTWK HTWL | Resting T-cell, re-excision | Lambda ZAP II | LP013 |
| HF6S | Human Whole 6 week Old Embryo | pBluescript | LP013 |
| | (II), subt | | |
| HHPS | Human Hippocampus, subtracted | pBluescript | LP013 |
| HLIS | LNCAP, differential expression | pBluescript | LP013 |
| HLHS HLHT | Early Stage Human Lung, Subtracted | pBluescript | LP013 |
| HSUS | Supt cells, cyclohexamide treated, | pBluescript | LP013 |
| | subtracted | | |
| HSUT | Supt cells, cyclohexamide treated, | pBluescript | LP013 |
| | differentially expressed | | |
| HSDS | H. Striatum Depression, subtracted | pBluescript | LP013 |
| HPTZ | Human Pituitary, Subtracted VII | pBluescript | LP013 |
| HSDX | H. Striatum Depression, subt II | pBluescript | LP013 |
| HSDZ | H. Striatum Depression, subt | pBluescript | LP013 |
| HPBA HPBB HPBC HPBD HPBE | Human Pineal Gland | pBluescript SK- | LP013 |
| HRTA | Colorectal Tumor | pBluescript SK- | LP013 |
| HSBA HSBB HSBC HSBM | HSC172 cells | pBluescript SK- | LP013 |
| HJAA HJAB HJAC HJAD | Jurkat T-cell G1 phase | pBluescript SK- | LP013 |
| HJBA HJBB HJBC HJBD | Jurkat T-cell, S1 phase | pBluescript SK- | LP013 |
| HTNA HTNB | Human Thyroid | pBluescript SK- | LP013 |
| HAHA HAHB | Human Adult Heart | Uni-ZAP XR | LP013 |
| HE6A | Whole 6 week Old Embryo | Uni-ZAP XR | LP013 |
| HFCA HFCB HFCC HFCD HFCE | Human Fetal Brain | Uni-ZAP XR | LP013 |
| HFKC HFKD HFKE HFKF HFKG | Human Fetal Kidney | Uni-ZAP XR | LP013 |
| HGBA HGBD HGBE HGBF HGBG | Human Gall Bladder | Uni-ZAP XR | LP013 |
| HPRA HPRB HPRC HPRD | Human Prostate | Uni-ZAP XR | LP013 |
| HTEA HTEB HTEC HTED HTEE | Human Testes | Uni-ZAP XR | LP013 |
| HTTA HTTB HTTC HTTD HTTE | Human Testes Tumor | Uni-ZAP XR | LP013 |
| HYBA HYBB | Human Fetal Bone | Uni-ZAP XR | LP013 |
| HFLA | Human Fetal Liver | Uni-ZAP XR | LP013 |
| HHFB HHFC HHFD HHFE HHFF | Human Fetal Heart | Uni-ZAP XR | LP013 |
| HUVB HUVC HUVD HUVE | Human Umbilical Vein, End. remake | Uni-ZAP XR | LP013 |
| HTHB HTHC HTHD | Human Thymus | Uni-ZAP XR | LP013 |
| HSTA HSTB HSTC HSTD | Human Skin Tumor | Uni-ZAP XR | LP013 |
| HTAA HTAB HTAC HTAD HTAE | Human Activated T-cells | Uni-ZAP XR | LP013 |
| HFEA HFEB HFEC | Human Fetal Epithelium (skin) | Uni-ZAP XR | LP013 |
| HJPA HJPB HJPC HJPD | Human Jurkat Membrane Bound | Uni-ZAP XR | LP013 |
| | Polysomes | | |
| HESA | Human Epithelioid Sarcoma | Uni-ZAP XR | LP013 |
| HALS | Human Adult Liver, Subtracted | Uni-ZAP XR | LP013 |
| HFTA HFTB HFTC HFTD | Human Fetal Dura Mater | Uni-ZAP XR | LP013 |
| HCAA HCAB HCAC | Cem cells, cyclohexamide treated | Uni-ZAP XR | LP013 |
| HRGA HRGB HRGC HRGD | Raji Cells, cyclohexamide treated | Uni-ZAP XR | LP013 |
| HE9A HE9B HE9C HE9D HE9E | Nine Week Old Early Stage Human | Uni-ZAP XR | LP013 |
| HSFA | Human Fibrosarcoma | Uni-ZAP XR | LP013 |
| HATA HATB HATC HATD HATE | Human Adrenal Gland Tumor | Uni-ZAP XR | LP013 |
| HTRA | Human Trachea Tumor | Uni-ZAP XR | LP013 |
| HE2A HE2D HE2E HE2H HE2I | 12 Week Old Early Stage Human | Uni-ZAP XR | LP013 |
| HE2B HE2C HE2F HE2G HE2P | 12 Week Old Early Stage Human, II | Uni-ZAP XR | LP013 |
| HNEA HNEB HNEC HNED HNEE | Human Neutrophil | Uni-ZAP XR | LP013 |
| HBGA | Human Primary Breast Cancer | Uni-ZAP XR | LP013 |
| HPTS HPTT HPTU | Human Pituitary, subtracted | Uni-ZAP XR | LP013 |
| HMQA HMQB HMQC HMQD | Human Activated Monocytes | Uni-ZAP XR | LP013 |
| HOAA HOAB HOAC | Human Osteosarcoma | Uni-ZAP XR | LP013 |
| HTOA HTOD HTOE HTOF HTOG | human tonsils | Uni-ZAP XR | LP013 |
| HMGB | Human OB MG63 control fraction I | Uni-ZAP XR | LP013 |
| HOPB | Human OB HOS control fraction I | Uni-ZAP XR | LP013 |
| HOQB | Human OB HOS treated (1 nM E2) | Uni-ZAP XR | LP013 |
| | fraction I | | |
| HAUA HAUB HAUC | Amniotic Cells - TNF induced | Uni-ZAP XR | LP013 |
| HAQA HAQB HAQC HAQD | Amniotic Cells - Primary Culture | Uni-ZAP XR | LP013 |
| HROA HROC | HUMAN STOMACH | Uni-ZAP XR | LP013 |
| HBJA HBJB HBJC HBJD HBJE | HUMAN B CELL LYMPHOMA | Uni-ZAP XR | LP013 |
| HODA HODB HODC HODD | human ovarian cancer | Uni-ZAP XR | LP013 |
| HCPA | Corpus Callosum | Uni-ZAP XR | LP013 |
| HSOA | stomach cancer (human) | Uni-ZAP XR | LP013 |
| HERA | SKIN | Uni-ZAP XR | LP013 |
| HMDA | Brain-medulloblastoma | Uni-ZAP XR | LP013 |
| HGLA HGLB HGLD | Glioblastoma | Uni-ZAP XR | LP013 |
| HWTA HWTB HWTC | wilm's tumor | Uni-ZAP XR | LP013 |
| HEAA | H. Atrophic Endometrium | Uni-ZAP XR | LP013 |
| HAPN HAPO HAPP HAPQ HAPR | Human Adult Pulmonary; re-excision | Uni-ZAP XR | LP013 |
| HLTG HLTH | Human T-cell lymphoma; re-excision | Uni-ZAP XR | LP013 |
| HAHC HAHD HAHE | Human Adult Heart; re-excision | Uni-ZAP XR | LP013 |
| HAGA HAGB HAGC HAGD HAGE | Human Amygdala | Uni-ZAP XR | LP013 |
| HSJA HSJB HSJC | Smooth muscle-ILb induced | Uni-ZAP XR | LP013 |
| HSHA HSHB HSHC | Smooth muscle, IL1b induced | Uni-ZAP XR | LP013 |
| HPWA HPWB HPWC HPWD HPWE | Prostate BPH | Uni-ZAP XR | LP013 |
| HPIA HPIB HPIC | LNCAP prostate cell line | Uni-ZAP XR | LP013 |
| HPJA HPJB HPJC | PC3 Prostate cell line | Uni-ZAP XR | LP013 |
| HBTA | Bone Marrow Stroma, TNF&LPS ind | Uni-ZAP XR | LP013 |
| HMCF HMCG HMCH HMCI HMCJ | Macrophage-oxLDL; re-excision | Uni-ZAP XR | LP013 |
| HAGG HAGH HAGI | Human Amygdala; re-excision | Uni-ZAP XR | LP013 |
| HACA | H Adipose Tissue | Uni-ZAP XR | LP013 |
| HKFB | K562 + PMA (36 hrs), re-excision | ZAP Express | LP013 |
| HCWT HCWU HCWV | CD34 positive cells (cord blood), re- | ZAP Express | LP013 |
| | ex | | |
| HBWA | Whole brain | ZAP Express | LP013 |
| HBXA HBXB HBXC HBXD | Human Whole Brain #2 - Oligo dT > | ZAP Express | LP013 |
| | 1.5 Kb | | |
| HAVM | Temporal cortex-Alzheizmer | pT-Adv | LP014 |
| HAVT | Hippocampus, Alzheimer Subtracted | pT-Adv | LP014 |
| HHAS | CHME Cell Line | Uni-ZAP XR | LP014 |
| HAJR | Larynx normal | pSport 1 | LP014 |
| HWLE HWLF HWLG HWLH | Colon Normal | pSport 1 | LP014 |
| HCRM HCRN HCRO | Colon Carcinoma | pSport 1 | LP014 |
| HWLI HWLJ HWLK | Colon Normal | pSport 1 | LP014 |
| HWLQ HWLR HWLS HWLT | Colon Tumor | pSport 1 | LP014 |
| HBFM | Gastrocnemius Muscle | pSport 1 | LP014 |
| HBOD HBOE | Quadriceps Muscle | pSport 1 | LP014 |
| HBKD HBKE | Soleus Muscle | pSport 1 | LP014 |
| HCCM | Pancreatic Langerhans | pSport 1 | LP014 |
| HWGA | Larynx carcinoma | pSport 1 | LP014 |
| HWGM HWGN | Larynx carcinoma | pSport 1 | LP014 |
| HWLA HWLB HWLC | Normal colon | pSport 1 | LP014 |
| HWLM HWLN | Colon Tumor | pSport 1 | LP014 |
| HVAM HVAN HVAO | Pancreas Tumor | pSport 1 | LP014 |
| HWGQ | Larynx carcinoma | pSport 1 | LP014 |
| HAQM HAQN | Salivary Gland | pSport 1 | LP014 |
| HASM | Stomach; normal | pSport 1 | LP014 |
| HBCM | Uterus; normal | pSport 1 | LP014 |
| HCDM | Testis, normal | pSport 1 | LP014 |
| HDJM | Brain; normal | pSport 1 | LP014 |
| HEFM | Adrenal Gland, normal | pSport 1 | LP014 |
| HBAA | Rectum normal | pSport 1 | LP014 |
| HFDM | Rectum tumor | pSport 1 | LP014 |
| HGAM | Colon, normal | pSport 1 | LP014 |
| HHMM | Colon, tumor | pSport 1 | LP014 |
| HCLB HCLC | Human Lung Cancer | Lambda Zap II | LP015 |
| HRLA | L1 Cell line | ZAP Express | LP015 |
| HHAM | Hypothalamus, Alzheimer's | pCMVSport 3.0 | LP015 |
| HKBA | Ku 812F Basophils Line | pSport 1 | LP015 |
| HS2S | Saos2, Dexamethosome Treated | pSport 1 | LP016 |
| HA5A | Lung Carcinoma A549 TNF alpha | pSport 1 | LP016 |
| | activated | | |
| HTFM | TF-1 Cell Line GM-CSF Treated | pSport 1 | LP016 |
| HYAS | Thyroid Tumor | pSport 1 | LP016 |
| HUTS | Larynx Normal | pSport 1 | LP016 |
| HXOA | Larynx Tumor | pSport 1 | LP016 |
| HEAH | Ea.hy.926 cell line | pSport 1 | LP016 |
| HINA | Adenocarcinoma Human | pSport 1 | LP016 |
| HRMA | Lung Mesothelium | pSport 1 | LP016 |
| HLCL | Human Pre-Differentiated Adipocytes | Uni-Zap XR | LP017 |
| HS2A | Saos2 Cells | pSport 1 | LP020 |
| HS2I | Saos2 Cells; Vitamin D3 Treated | pSport 1 | LP020 |
| HUCM | CHME Cell Line, untreated | pSport 1 | LP020 |
| HEPN | Aryepiglottis Normal | pSport 1 | LP020 |
| HPSN | Sinus Piniformis Tumor | pSport 1 | LP020 |
| HNSA | Stomach Normal | pSport 1 | LP020 |
| HNSM | Stomach Tumor | pSport 1 | LP020 |
| HNLA | Liver Normal Met5No | pSport 1 | LP020 |
| HUTA | Liver Tumor Met 5 Tu | pSport 1 | LP020 |
| HOCN | Colon Normal | pSport 1 | LP020 |
| HOCT | Colon Tumor | pSport 1 | LP020 |
| HTNT | Tongue Tumour | pSport 1 | LP020 |
| HLXN | Larynx Normal | pSport 1 | LP020 |
| HLXT | Larynx Tumour | pSport 1 | LP020 |
| HTYN | Thymus | pSport 1 | LP020 |
| HPLN | Placenta | pSport 1 | LP020 |
| HTNG | Tongue Normal | pSport 1 | LP020 |
| HZAA | Thyroid Normal (SDCA2 No) | pSport 1 | LP020 |
| HWES | Thyroid Thyroiditis | pSport 1 | LP020 |
| HFHD | Ficolled Human Stromal Cells, 5Fu | pTrip1Ex2 | LP021 |
| | treated | | |
| HFHM, HFHN | Ficolled Human Stromal Cells, | pTrip1Ex2 | LP021 |
| | Untreated | | |
| HPCI | Hep G2 Cells, lambda library | lambda Zap-CMV XR | LP021 |
| HBCA, HBCB, HBCC | H. Lymph node breast Cancer | Uni-ZAP XR | LP021 |
| HCOK | Chondrocytes | pSPORT1 | LP022 |
| HDCA, HDCB, HDCC | Dendritic Cells From CD34 Cells | pSPORT1 | LP022 |
| HDMA, HDMB | CD40 activated monocyte dendritic | pSPORT1 | LP022 |
| | cells | | |
| HDDM, HDDN, HDDO | LPS activated derived dendritic cells | pSPORT1 | LP022 |
| HPCR | Hep G2 Cells, PCR library | lambda Zap-CMV XR | LP022 |
| HAAA, HAAB, HAAC | Lung, Cancer (4005313A3): Invasive | pSPORT1 | LP022 |
| | Poorly Differentiated Lung | | |
| | Adenocarcinoma | | |
| HIPA, HIPB, HIPC | Lung, Cancer (4005163 B7): | pSPORT1 | LP022 |
| | Invasive, Poorly Diff | | |
| | Adenocarcinoma, Metastatic | | |
| HOOH, HOOI | Ovary, Cancer (4004562 B6) | pSPORT1 | LP022 |
| | Papillary Serous Cystic Neoplasm, | | |
| | Low Malignant Pot | | |
| HIDA | Lung, Normal: (4005313 B1) | pSPORT1 | LP022 |
| HUJA, HUJB, HUJC, HUJD, HUJE | B-Cells | pCMVSport 3.0 | LP022 |
| HNOA, HNOB, HNOC, HNOD | Ovary, Normal: (9805C040R) | pSPORT1 | LP022 |
| HNLM | Lung, Normal: (4005313 B1) | pSPORT1 | LP022 |
| HSCL | Stromal Cells | pSPORT1 | LP022 |
| HAAX | Lung, Cancer: (4005313 A3) Invasive | pSPORT1 | LP022 |
| | Poorly-differentiated Metastatic lung | | |
| | adenocarcinoma | | |
| HUUA, HUUB, HUUC, HUUD | B-cells (unstimulated) | pTrip1Ex2 | LP022 |
| HWWA, HWWB, HWWC, HWWD, HWWE, | B-cells (stimulated) | pSPORT1 | LP022 |
| HWWF, HWWG | | | |
| HCCC | Colon, Cancer: (9808C064R) | pCMVSport 3.0 | LP023 |
| HPDO HPDP HPDQ HPDR HPD | Ovary, Cancer (9809C332): Poorly | pSport 1 | LP023 |
| | differentiated adenocarcinoma | | |
| HPCO HPCP HPCQ HPCT | Ovary, Cancer (15395A1F): Grade II | pSport 1 | LP023 |
| | Papillary Carcinoma | | |
| HOCM HOCO HOCP HOCQ | Ovary, Cancer: (15799A1F) Poorly | pSport 1 | LP023 |
| | differentiated carcinoma | | |
| HCBM HCBN HCBO | Breast, Cancer: (4004943 A5) | pSport 1 | LP023 |
| HNBT HNBU HNBV | Breast, Normal: (4005522B2) | pSport 1 | LP023 |
| HBCP HBCQ | Breast, Cancer: (4005522 A2) | pSport 1 | LP023 |
| HBCJ | Breast, Cancer: (9806C012R) | pSport 1 | LP023 |
| HSAM HSAN | Stromal cells 3.88 | pSport 1 | LP023 |
| HVCA HVCB HVCC HVCD | Ovary, Cancer: (4004332 A2) | pSport 1 | LP023 |
| HSCK HSEN HSEO | Stromal cells (HBM3 18) | pSport 1 | LP023 |
| HSCP HSCQ | stromal cell clone 2.5 | pSport 1 | LP023 |
| HUXA | Breast Cancer: (4005385 A2) | pSport 1 | LP023 |
| HCOM HCON HCOO HCOP HCOQ | Ovary, Cancer (4004650 A3): Well- | pSport 1 | LP023 |
| | Differentiated Micropapillary Serous | | |
| | Carcinoma | | |
| HBNM | Breast, Cancer: (9802C020E) | pSport 1 | LP023 |
| HVVA HVVB HVVC HVVD HVVE | Human Bone Marrow, treated | pSport 1 | LP023 |

[0874] Two nonlimiting examples are provided below for isolating a particular clone from the deposited sample of plasmid cDNAs cited for that clone in Table 7. First, a plasmid is directly isolated by screening the clones using a polynucleotide probe corresponding to the nucleotide sequence of SEQ ID NO:X.

[0875] Particularly, a specific polynucleotide with 30-40 nucleotides is synthesized using an Applied Biosystems DNA synthesizer according to the sequence reported. The oligonucleotide is labeled, for instance, with ³²P-γ-ATP using T4 polynucleotide kinase and purified according to routine methods. (E.g., Maniatis et al., Molecular Cloning: A Laboratory Manual, Cold Spring Harbor Press, Cold Spring, N.Y. (1982)). The plasmid mixture is transformed into a suitable host, as indicated above (such as XL-1 Blue (Stratagene)) using techniques known to those of skill in the art, such as those provided by the vector supplier or in related publications or patents cited above. The transformants are plated on 1.5% agar plates (containing the appropriate selection agent, e.g., ampicillin) to a density of about 150 transformants (colonies) per plate. These plates are screened using Nylon membranes according to routine methods for bacterial colony screening (e.g., Sambrook et al., Molecular Cloning: A Laboratory Manual, 2nd Edit., (1989), Cold Spring Harbor Laboratory Press, pages 1.93 to 1.104), or other techniques known to those of skill in the art.

[0876] Alternatively, two primers of 17-20 nucleotides derived from both ends of the nucleotide sequence of SEQ ID NO:X are synthesized and used to amplify the desired cDNA using the deposited cDNA plasmid as a template. The polymerase chain reaction is carried out under routine conditions, for instance, in 25 l of reaction mixture with 0.5 ug of the above cDNA template. A convenient reaction mixture is 1.5-5 mM MgCl₂, 0.01% (w/v) gelatin, 20 μM each of dATP, dCTP, dGTP, dTTP, 25 pmol of each primer and 0.25 Unit of Taq polymerase. Thirty five cycles of PCR (denaturation at 94° C. for 1 min; annealing at 55° C. for 1 min; elongation at 72° C. for 1 min) are performed with a Perkin-Elmer Cetus automated thermal cycler. The amplified product is analyzed by agarose gel electrophoresis and the DNA band with expected molecular weight is excised and purified. The PCR product is verified to be the selected sequence by subcloning and sequencing the DNA product.

[0877] Several methods are available for the identification of the 5′ or 3′ non-coding portions of a gene which may not be present in the deposited clone. These methods include but are not limited to, filter probing, clone enrichment using specific probes, and protocols similar or identical to 5′ and 3′ “RACE” protocols which are well known in the art. For instance, a method similar to 5′ RACE is available for generating the missing 5′ end of a desired full-length transcript. (Fromont-Racine et al., Nucleic Acids Res. 21(7):1683-1684 (1993)).

[0878] Briefly, a specific RNA oligonucleotide is ligated to the 5′ ends of a population of RNA presumably containing full-length gene RNA transcripts. A primer set containing a primer specific to the ligated RNA oligonucleotide and a primer specific to a known sequence of the gene of interest is used to PCR amplify the 5′ portion of the desired full-length gene. This amplified product may then be sequenced and used to generate the full length gene.

[0879] This above method starts with total RNA isolated from the desired source, although poly-A+ RNA can be used. The RNA preparation can then be treated with phosphatase if necessary to eliminate 5′ phosphate groups on degraded or damaged RNA which may interfere with the later RNA ligase step. The phosphatase should then be inactivated and the RNA treated with tobacco acid pyrophosphatase in order to remove the cap structure present at the 5′ ends of messenger RNAs. This reaction leaves a 5′ phosphate group at the 5′ end of the cap cleaved RNA which can then be ligated to an RNA oligonucleotide using T4 RNA ligase.

[0880] This modified RNA preparation is used as a template for first strand cDNA synthesis using a gene specific oligonucleotide. The first strand synthesis reaction is used as a template for PCR amplification of the desired 5′ end using a primer specific to the ligated RNA oligonucleotide and a primer specific to the known sequence of the gene of interest. The resultant product is then sequenced and analyzed to confirm that the 5′ end sequence belongs to the desired gene.

### Example 2

### Isolation of Genomic Clones Corresponding to a Polynucleotide

[0881] A human genomic P1 library (Genomic Systems, Inc.) is screened by PCR using primers selected for the sequence corresponding to SEQ ID NO:X according to the method described in Example 1. (See also, Sambrook.)

### Example 3

### Tissue Specific Expression Analysis

[0882] The Human Genome Sciences, Inc. (HGS) database is derived from sequencing tissue and/or disease specific cDNA libraries. Libraries generated from a particular tissue are selected and the specific tissue expression pattern of EST groups or assembled contigs within these libraries is determined by comparison of the expression patterns of those groups or contigs within the entire database. ESTs and assembled contigs which show tissue specific expression are selected.

[0883] The original clone from which the specific EST sequence was generated, or in the case of an assembled contig, the clone from which the 5′ most EST sequence was generated, is obtained from the catalogued library of clones and the insert amplified by PCR using methods known in the art. The PCR product is denatured and then transferred in 96 or 384 well format to a nylon membrane (Schleicher and Scheull) generating an array filter of tissue specific clones. Housekeeping genes, maize genes, and known tissue specific genes are included on the filters. These targets can be used in signal normalization and to validate assay sensitivity. Additional targets are included to monitor probe length and specificity of hybridization.

[0884] Radioactively labeled hybridization probes are generated by first strand cDNA synthesis per the manufacturer's instructions (Life Technologies) from mRNA/RNA samples prepared from the specific tissue being analyzed (e.g., prostate, prostate cancer, ovarian, ovarian cancer, etc.). The hybridization probes are purified by gel exclusion chromatography, quantitated, and hybridized with the array filters in hybridization bottles at 65° C. overnight. The filters are washed under stringent conditions and signals are captured using a Fuji phosphorimager.

[0885] Data is extracted using AIS software and following background subtraction, signal normalization is performed. This includes a normalization of filter-wide expression levels between different experimental runs. Genes that are differentially expressed in the tissue of interest are identified.

### Example 4

### Chromosomal Mapping of the Polynucleotides

[0886] An oligonucleotide primer set is designed according to the sequence at the 5′ end of SEQ ID NO:X. This primer preferably spans about 100 nucleotides. This primer set is then used in a polymerase chain reaction under the following set of conditions: 30 seconds, 95° C.; 1 minute, 56° C.; 1 minute, 70° C. This cycle is repeated 32 times followed by one 5 minute cycle at 70° C. Human, mouse, and hamster DNA is used as template in addition to a somatic cell hybrid panel containing individual chromosomes or chromosome fragments (Bios, Inc). The reactions are analyzed on either 8% polyacrylamide gels or 3.5% agarose gels. Chromosome mapping is determined by the presence of an approximately 100 bp PCR fragment in the particular somatic cell hybrid.

### Example 5

### Bacterial Expression of a Polypeptide

[0887] A polynucleotide encoding a polypeptide of the present invention is amplified using PCR oligonucleotide primers corresponding to the 5′ and 3′ ends of the DNA sequence, as outlined in Example 1, to synthesize insertion fragments. The primers used to amplify the cDNA insert should preferably contain restriction sites, such as BamHI and XbaI, at the 5′ end of the primers in order to clone the amplified product into the expression vector. For example, BamHI and XbaI correspond to the restriction enzyme sites on the bacterial expression vector pQE-9. (Qiagen, Inc., Chatsworth, Calif.). This plasmid vector encodes antibiotic resistance (Ampr), a bacterial origin of replication (ori), an IPTG-regulatable promoter/operator (P/O), a ribosome binding site (RBS), a 6-histidine tag (6-His), and restriction enzyme cloning sites.

[0888] The pQE-9 vector is digested with BamHI and XbaI and the amplified fragment is ligated into the pQE-9 vector maintaining the reading frame initiated at the bacterial RBS. The ligation mixture is then used to transform the E. coli strain M15/rep4 (Qiagen, Inc.) which contains multiple copies of the plasmid pREP4, which expresses the lad repressor and also confers kanamycin resistance (Kan^{r}). Transformants are identified by their ability to grow on LB plates and ampicillin/kanamycin resistant colonies are selected. Plasmid DNA is isolated and confirmed by restriction analysis.

[0889] Clones containing the desired constructs are grown overnight (O/N) in liquid culture in LB media supplemented with both Amp (100 ug/ml) and Kan (25 ug/ml). The O/N culture is used to inoculate a large culture at a ratio of 1:100 to 1:250. The cells are grown to an optical density 600 (O.D.⁶⁰⁰) of between 0.4 and 0.6. IPTG (Isopropyl-B-D-thiogalacto pyranoside) is then added to a final concentration of 1 mM. IPTG induces by inactivating the lacI repressor, clearing the P/O leading to increased gene expression.

[0890] Cells are grown for an extra 3 to 4 hours. Cells are then harvested by centrifugation (20 mins at 6000×g). The cell pellet is solubilized in the chaotropic agent 6 Molar Guanidine HCl by stirring for 3-4 hours at 4° C. The cell debris is removed by centrifugation, and the supernatant containing the polypeptide is loaded onto a nickel-nitrilo-tri-acetic acid (“Ni-NTA”) affinity resin column (available from QIAGEN, Inc., supra). Proteins with a 6×His tag bind to the Ni-NTA resin with high affinity and can be purified in a simple one-step procedure (for details see: The QIAexpressionist (1995) QIAGEN, Inc., supra).

[0891] Briefly, the supernatant is loaded onto the column in 6 M guanidine-HCl, pH 8. The column is first washed with 10 volumes of 6 M guanidine-HCl, pH 8, then washed with 10 volumes of 6 M guanidine-HCl pH 6, and finally the polypeptide is eluted with 6 M guanidine-HCl, pH 5.

[0892] The purified protein is then renatured by dialyzing it against phosphate-buffered saline (PBS) or 50 mM Na-acetate, pH 6 buffer plus 200 mM NaCl. Alternatively, the protein can be successfully refolded while immobilized on the Ni-NTA column. The recommended conditions are as follows: renature using a linear 6M-1M urea gradient in 500 mM NaCl, 20% glycerol, 20 mM Tris/HCl pH 7.4, containing protease inhibitors. The renaturation should be performed over a period of 1.5 hours or more. After renaturation the proteins are eluted by the addition of 250 mM immidazole. Immidazole is removed by a final dialyzing step against PBS or 50 mM sodium acetate pH 6 buffer plus 200 mM NaCl. The purified protein is stored at 4° C. or frozen at −80° C.

[0893] In addition to the above expression vector, the present invention further includes an expression vector, called pHE4a (ATCC Accession Number 209645, deposited on Feb. 25, 1998) which contains phage operator and promoter elements operatively linked to a polynucleotide of the present invention, called pHE4a. (ATCC Accession Number 209645, deposited on Feb. 25, 1998.) This vector contains: 1) a neomycinphosphotransferase gene as a selection marker, 2) an E. coli origin of replication, 3) a T5 phage promoter sequence, 4) two lac operator sequences, 5) a Shine-Delgarno sequence, and 6) the lactose operon repressor gene (lacIq). The origin of replication (oriC) is derived from pUC19 (LTI, Gaithersburg, Md.). The promoter and operator sequences are made synthetically.

[0894] DNA can be inserted into the pHE4a by restricting the vector with NdeI and XbaI, BamHI, XhoI, or Asp718, running the restricted product on a gel, and isolating the larger fragment (the stuffer fragment should be about 310 base pairs). The DNA insert is generated according to the PCR protocol described in Example 1, using PCR primers having restriction sites for NdeI (5′ primer) and XbaI, BamHI, XhoI, or Asp718 (3′ primer). The PCR insert is gel purified and restricted with compatible enzymes. The insert and vector are ligated according to standard protocols.

[0895] The engineered vector could easily be substituted in the above protocol to express protein in a bacterial system.

### Example 6

### Purification of a Polypeptide from an Inclusion Body

[0896] The following alternative method can be used to purify a polypeptide expressed in E coli when it is present in the form of inclusion bodies. Unless otherwise specified, all of the following steps are conducted at 4-10° C.

[0897] Upon completion of the production phase of the E. coli fermentation, the cell culture is cooled to 4-10° C. and the cells harvested by continuous centrifugation at 15,000 rpm (Heraeus Sepatech). On the basis of the expected yield of protein per unit weight of cell paste and the amount of purified protein required, an appropriate amount of cell paste, by weight, is suspended in a buffer solution containing 100 mM Tris, 50 mM EDTA, pH 7.4. The cells are dispersed to a homogeneous suspension using a high shear mixer.

[0898] The cells are then lysed by passing the solution through a microfluidizer (Microfuidics, Corp. or APV Gaulin, Inc.) twice at 4000-6000 psi. The homogenate is then mixed with NaCl solution to a final concentration of 0.5 M NaCl, followed by centrifugation at 7000×g for 15 min. The resultant pellet is washed again using 0.5M NaCl, 100 mM Tris, 50 mM EDTA, pH 7.4.

[0899] The resulting washed inclusion bodies are solubilized with 1.5 M guanidine hydrochloride (GuHCl) for 2-4 hours. After 7000×g centrifugation for 15 min., the pellet is discarded and the polypeptide containing supernatant is incubated at 4° C. overnight to allow further GuHCl extraction.

[0900] Following high speed centrifugation (30,000×g) to remove insoluble particles, the GuHCl solubilized protein is refolded by quickly mixing the GuHCl extract with 20 volumes of buffer containing 50 mM sodium, pH 4.5, 150 mM NaCl, 2 mM EDTA by vigorous stirring. The refolded diluted protein solution is kept at 4° C. without mixing for 12 hours prior to further purification steps.

[0901] To clarify the refolded polypeptide solution, a previously prepared tangential filtration unit equipped with 0.16 μm membrane filter with appropriate surface area (e.g., Filtron), equilibrated with 40 mM sodium acetate, pH 6.0 is employed. The filtered sample is loaded onto a cation exchange resin (e.g., Poros HS-50, Perseptive Biosystems). The column is washed with 40 mM sodium acetate, pH 6.0 and eluted with 250 mM, 500 mM, 1000 mM, and 1500 mM NaCl in the same buffer, in a stepwise manner. The absorbance at 280 nm of the effluent is continuously monitored. Fractions are collected and further analyzed by SDS-PAGE.

[0902] Fractions containing the polypeptide are then pooled and mixed with 4 volumes of water. The diluted sample is then loaded onto a previously prepared set of tandem columns of strong anion (Poros HQ-50, Perseptive Biosystems) and weak anion (Poros CM-20, Perseptive Biosystems) exchange resins. The columns are equilibrated with 40 mM sodium acetate, pH 6.0. Both columns are washed with 40 mM sodium acetate, pH 6.0, 200 mM NaCl. The CM-20 column is then eluted using a 10 column volume linear gradient ranging from 0.2 M NaCl, 50 mM sodium acetate, pH 6.0 to 1.0 M NaCl, 50 mM sodium acetate, pH 6.5. Fractions are collected under constant A₂₈₀ monitoring of the effluent. Fractions containing the polypeptide (determined, for instance, by 16% SDS-PAGE) are then pooled.

[0903] The resultant polypeptide should exhibit greater than 95% purity after the above refolding and purification steps. No major contaminant bands should be observed from Commassie blue stained 16% SDS-PAGE gel when 5 μg of purified protein is loaded. The purified protein can also be tested for endotoxin/LPS contamination, and typically the LPS content is less than 0.1 ng/ml according to LAL assays.

### Example 7

### Cloning and Expression of a Polypeptide in a Baculovirus Expression System

[0904] In this example, the plasmid shuttle vector pA2 is used to insert a polynucleotide into a baculovirus to express a polypeptide. This expression vector contains the strong polyhedrin promoter of the Autographa californica nuclear polyhedrosis virus (AcMNPV) followed by convenient restriction sites such as BamHI, Xba I and Asp718. The polyadenylation site of the simian virus 40 (“SV40”) is used for efficient polyadenylation. For easy selection of recombinant virus, the plasmid contains the beta-galactosidase gene from E. coli under control of a weak Drosophila promoter in the same orientation, followed by the polyadenylation signal of the polyhedrin gene. The inserted genes are flanked on both sides by viral sequences for cell-mediated homologous recombination with wild-type viral DNA to generate a viable virus that express the cloned polynucleotide.

[0905] Many other baculovirus vectors can be used in place of the vector above, such as pAc373, pVL941, and pAcIM1, as one skilled in the art would readily appreciate, as long as the construct provides appropriately located signals for transcription, translation, secretion and the like, including a signal peptide and an in-frame AUG as required. Such vectors are described, for instance, in Luckow et al., Virology 170:31-39 (1989).

[0906] Specifically, the cDNA sequence contained in the deposited clone, including the AUG initiation codon, is amplified using the PCR protocol described in Example 1. If a naturally occurring signal sequence is used to produce the polypeptide of the present invention, the pA2 vector does not need a second signal peptide. Alternatively, the vector can be modified (pA2 GP) to include a baculovirus leader sequence, using the standard methods described in Summers et al., “A Manual of Methods for Baculovirus Vectors and Insect Cell Culture Procedures,” Texas Agricultural Experimental Station Bulletin No. 1555 (1987).

[0907] The amplified fragment is isolated from a 1% agarose gel using a commercially available kit (“Geneclean,” BIO 101 Inc., La Jolla, Calif.). The fragment then is digested with appropriate restriction enzymes and again purified on a 1% agarose gel.

[0908] The plasmid is digested with the corresponding restriction enzymes and optionally, can be dephosphorylated using calf intestinal phosphatase, using routine procedures known in the art. The DNA is then isolated from a 1% agarose gel using a commercially available kit (“Geneclean” BIO 101 Inc., La Jolla, Calif.).

[0909] The fragment and the dephosphorylated plasmid are ligated together with T4 DNA ligase. E. coli HB101 or other suitable E. coli hosts such as XL-1 Blue (Stratagene Cloning Systems, La Jolla, Calif.) cells are transformed with the ligation mixture and spread on culture plates. Bacteria containing the plasmid are identified by digesting DNA from individual colonies and analyzing the digestion product by gel electrophoresis. The sequence of the cloned fragment is confirmed by DNA sequencing.

[0910] Five μg of a plasmid containing the polynucleotide is co-transfected with 1.0 μg of a commercially available linearized baculovirus DNA (“BaculoGold™ baculovirus DNA, Pharmingen, San Diego, Calif.), using the lipofection method described by Felgner et al., Proc. Natl. Acad. Sci. USA 84:7413-7417 (1987). One μg of BaculoGold™ virus DNA and 5 μg of the plasmid are mixed in a sterile well of a microtiter plate containing 50 μl of serum-free Grace's medium (Life Technologies Inc., Gaithersburg, Md.). Afterwards, 10 μl Lipofectin plus 90 μl Grace's medium are added, mixed and incubated for 15 minutes at room temperature. Then the transfection mixture is added drop-wise to Sf9 insect cells (ATCC CRL 1711) seeded in a 35 mm tissue culture plate with 1 ml Grace's medium without serum. The plate is then incubated for 5 hours at 27° C. The transfection solution is then removed from the plate and 1 ml of Grace's insect medium supplemented with 10% fetal calf serum is added. Cultivation is then continued at 27° C. for four days.

[0911] After four days the supernatant is collected and a plaque assay is performed, as described by Summers and Smith, supra. An agarose gel with “Blue Gal” (Life Technologies Inc., Gaithersburg) is used to allow easy identification and isolation of gal-expressing clones, which produce blue-stained plaques. (A detailed description of a “plaque assay” of this type can also be found in the user's guide for insect cell culture and baculovirology distributed by Life Technologies Inc., Gaithersburg, page 9-10.) After appropriate incubation, blue stained plaques are picked with the tip of a micropipettor (e.g., Eppendorf). The agar containing the recombinant viruses is then resuspended in a microcentrifuge tube containing 200 μl of Grace's medium and the suspension containing the recombinant baculovirus is used to infect Sf9 cells seeded in 35 mm dishes. Four days later the supernatants of these culture dishes are harvested and then they are stored at 4° C.

[0912] To verify the expression of the polypeptide, Sf9 cells are grown in Grace's medium supplemented with 10% heat-inactivated FBS. The cells are infected with the recombinant baculovirus containing the polynucleotide at a multiplicity of infection (“MOI”) of about 2. If radiolabeled proteins are desired, 6 hours later the medium is removed and is replaced with SF900 II medium minus methionine and cysteine (available from Life Technologies Inc., Rockville, Md.). After 42 hours, 5 μCi of ³⁵S-methionine and 5 μCi ³⁵S-cysteine (available from Amersham) are added. The cells are further incubated for 16 hours and then are harvested by centrifugation. The proteins in the supernatant as well as the intracellular proteins are analyzed by SDS-PAGE followed by autoradiography (if radiolabeled).

[0913] Microsequencing of the amino acid sequence of the amino terminus of purified protein may be used to determine the amino terminal sequence of the produced protein.

### Example 8

### Expression of a Polypeptide in Mammalian Cells

[0914] The polypeptide of the present invention can be expressed in a mammalian cell. A typical mammalian expression vector contains a promoter element, which mediates the initiation of transcription of mRNA, a protein coding sequence, and signals required for the termination of transcription and polyadenylation of the transcript. Additional elements include enhancers, Kozak sequences and intervening sequences flanked by donor and acceptor sites for RNA splicing. Highly efficient transcription is achieved with the early and late promoters from SV40, the long terminal repeats (LTRs) from Retroviruses, e.g., RSV, HTLVI, HIVI and the early promoter of the cytomegalovirus (CMV). However, cellular elements can also be used (e.g., the human actin promoter).

[0915] Suitable expression vectors for use in practicing the present invention include, for example, vectors such as pSVL and pMSG (Pharmacia, Uppsala, Sweden), pRSVcat (ATCC 37152), pSV2dhfr (ATCC 37146), pBC12MI (ATCC 67109), pCMVSport 2.0, and pCMVSport 3.0. Mammalian host cells that could be used include, human Hela, 293, H9 and Jurkat cells, mouse NIH3T3 and C127 cells, Cos 1, Cos 7 and CV1, quail QC1-3 cells, mouse L cells and Chinese hamster ovary (CHO) cells.

[0916] Alternatively, the polypeptide can be expressed in stable cell lines containing the polynucleotide integrated into a chromosome. The co-transfection with a selectable marker such as DHFR, gpt, neomycin, or hygromycin allows the identification and isolation of the transfected cells.

[0917] The transfected gene can also be amplified to express large amounts of the encoded protein. The DHFR (dihydrofolate reductase) marker is useful in developing cell lines that carry several hundred or even several thousand copies of the gene of interest. (See, e.g., Alt, F. W., et al., J. Biol. Chem. 253:1357-1370 (1978); Hamlin, J. L. and Ma, C., Biochem. et Biophys. Acta, 1097:107-143 (1990); Page, M. J. and Sydenham, M. A., Biotechnology 9:64-68 (1991)). Another useful selection marker is the enzyme glutamine synthase (GS) (Murphy et al., Biochem J. 227:277-279 (1991); Bebbington et al., Bio/Technology 10:169-175 (1992). Using these markers, the mammalian cells are grown in selective medium and the cells with the highest resistance are selected. These cell lines contain the amplified gene(s) integrated into a chromosome. Chinese hamster ovary (CHO) and NSO cells are often used for the production of proteins.

[0918] Derivatives of the plasmid pSV2-dhfr (ATCC Accession No. 37146), the expression vectors pC4 (ATCC Accession No. 209646) and pC6 (ATCC Accession No.209647) contain the strong promoter (LTR) of the Rous Sarcoma Virus (Cullen et al., Molecular and Cellular Biology, 438-447 (March, 1985)) plus a fragment of the CMV-enhancer (Boshart et al., Cell 41:521-530 (1985)). Multiple cloning sites, e.g., with the restriction enzyme cleavage sites BamHI, XbaI and Asp718, facilitate the cloning of the gene of interest. The vectors also contain the 3′ intron, the polyadenylation and termination signal of the rat preproinsulin gene, and the mouse DHFR gene under control of the SV40 early promoter.

[0919] Specifically, the plasmid pC6, for example, is digested with appropriate restriction enzymes and then dephosphorylated using calf intestinal phosphates by procedures known in the art. The vector is then isolated from a 1% agarose gel.

[0920] A polynucleotide of the present invention is amplified according to the protocol outlined in Example 1. If a naturally occurring signal sequence is used to produce the polypeptide of the present invention, the vector does not need a second signal peptide. Alternatively, if a naturally occurring signal sequence is not used, the vector can be modified to include a heterologous signal sequence. (See, e.g., International Publication No. WO 96/34891.)

[0921] The amplified fragment is isolated from a 1% agarose gel using a commercially available kit (“Geneclean,” BIO 101 Inc., La Jolla, Calif.). The fragment then is digested with appropriate restriction enzymes and again purified on a 1% agarose gel.

[0922] The amplified fragment is then digested with the same restriction enzyme and purified on a 1% agarose gel. The isolated fragment and the dephosphorylated vector are then ligated with T4 DNA ligase. E. coli HB101 or XL-1 Blue cells are then transformed and bacteria are identified that contain the fragment inserted into plasmid pC6 using, for instance, restriction enzyme analysis.

[0923] Chinese hamster ovary cells lacking an active DHFR gene is used for transfection. Five μg of the expression plasmid pC6 or pC4 is cotransfected with 0.5 μg of the plasmid pSVneo using lipofectin (Felgner et al., supra). The plasmid pSV2-neo contains a dominant selectable marker, the neo gene from Tn5 encoding an enzyme that confers resistance to a group of antibiotics including G418. The cells are seeded in alpha minus MEM supplemented with 1 mg/ml G418. After 2 days, the cells are trypsinized and seeded in hybridoma cloning plates (Greiner, Germany) in alpha minus MEM supplemented with 10, 25, or 50 ng/ml of methotrexate plus 1 mg/ml G418. After about 10-14 days single clones are trypsinized and then seeded in 6-well petri dishes or 10 ml flasks using different concentrations of methotrexate (50 nM, 100 nM, 200 nM, 400 nM, 800 nM). Clones growing at the highest concentrations of methotrexate are then transferred to new 6-well plates containing even higher concentrations of methotrexate (1 μM, 2 μM, 5 μM, 10 mM, 20 mM). The same procedure is repeated until clones are obtained which grow at a concentration of 100-200 μM. Expression of the desired gene product is analyzed, for instance, by SDS-PAGE and Western blot or by reversed phase HPLC analysis.

### Example 9

### Protein Fusions

[0924] The polypeptides of the present invention are preferably fused to other proteins. These fusion proteins can be used for a variety of applications. For example, fusion of the present polypeptides to His-tag, HA-tag, protein A, IgG domains, and maltose binding protein facilitates purification. (See Example 5; see also EP A 394,827; Traunecker, et al., Nature 331:84-86 (1988)). Similarly, fusion to IgG-1, IgG-3, and albumin increases the halflife time in vivo. Nuclear localization signals fused to the polypeptides of the present invention can target the protein to a specific subcellular localization, while covalent heterodimer or homodimers can increase or decrease the activity of a fusion protein. Fusion proteins can also create chimeric molecules having more than one function. Finally, fusion proteins can increase solubility and/or stability of the fused protein compared to the non-fused protein. All of the types of fusion proteins described above can be made by modifying the following protocol, which outlines the fusion of a polypeptide to an IgG molecule, or the protocol described in Example 5.

[0925] Briefly, the human Fc portion of the IgG molecule can be PCR amplified, using primers that span the 5′ and 3′ ends of the sequence described below. These primers also should have convenient restriction enzyme sites that will facilitate cloning into an expression vector, preferably a mammalian expression vector.

[0926] For example, if pC4 (ATCC Accession No. 209646) is used, the human Fc portion can be ligated into the BamHI cloning site. Note that the 3′ BamHI site should be destroyed. Next, the vector containing the human Fc portion is re-restricted with BamHI, linearizing the vector, and a polynucleotide of the present invention, isolated by the PCR protocol described in Example 1, is ligated into this BamHI site. Note that the polynucleotide is cloned without a stop codon, otherwise a fusion protein will not be produced.

[0927] If the naturally occurring signal sequence is used to produce the polypeptide of the present invention, pC4 does not need a second signal peptide. Alternatively, if the naturally occurring signal sequence is not used, the vector can be modified to include a heterologous signal sequence. (See, e.g., International Publication No. WO 96/34891.)

Human IgG Fc region

(SEQ ID NO: 1)

GGGATCCGGAGCCCAAATCTTCTGACAAAACTCACACATGCCCACCGTGC
CCAGCACCTGAATTCGAGGGTGCACCGTCAGTCTTCCTCTTCCCCCCAAA
ACCCAAGGACACCCTCATGATCTCCCGGACTCCTGAGGTCACATGCGTGG
TGGTGGACGTAAGCCACGAAGACCCTGAGGTCAAGTTCAACTGGTACGTG
GACGGCGTGGAGGTGCATAATGCCAAGACAAAGCCGCGGGAGGAGCAGTA
CAACAGCACGTACCGTGTGGTCAGCGTCCTCACCGTCCTGCACCAGGACT
GGCTGAATGGCAAGGAGTACAAGTGCAAGGTCTCCAACAAAGCCCTCCCA
ACCCCCATCGAGAAAACCATCTCCAAAGCCAAAGGGCAGCCCCGAGAACC
ACAGGTGTACACCCTGCCCCCATCCCGGGATGAGCTGACCAAGAACCAGG
TCAGCCTGACCTGCCTGGTCAAAGGCTTCTATCCAAGCGACATCGCCGTG
GAGTGGGAGAGCAATGGGCAGCCGGAGAACAACTACAAGACCACGCCTCC
CGTGCTGGACTCCGACGGCTCCTTCTTCCTCTACAGCAAGCTCACCGTGG
ACAAGAGCAGGTGGCAGCAGGGGAACGTCTTCTCATGCTCCGTGATGCAT
GAGGCTCTGCACAACCACTACACGCAGAAGAGCCTCTCCCTGTCTCCGGG
TAAATGAGTGCGACGGCCGCGACTCTAGAGGAT

### Example 10

### Production of an Antibody from a Polypeptide

[0928] a) Hybridoma Technology

[0929] The antibodies of the present invention can be prepared by a variety of methods. (See, Current Protocols, Chapter 2.) As one example of such methods, cells expressing a polypeptide of the present invention are administered to an animal to induce the production of sera containing polyclonal antibodies. In a preferred method, a preparation of a a polypeptide of the present invention is prepared and purified to render it substantially free of natural contaminants. Such a preparation is then introduced into an animal in order to produce polyclonal antisera of greater specific activity.

[0930] Monoclonal antibodies specific for a polypeptide of the present invention are prepared using hybridoma technology (Kohler et al., Nature 256:495 (1975); Kohler et al., Eur. J. Immunol. 6:511 (1976); Kohler et al., Eur. J. Immunol. 6:292 (1976); Hammerling et al., in: Monoclonal Antibodies and T-Cell Hybridomas, Elsevier, N.Y., pp. 563-681 (1981)). In general, an animal (preferably a mouse) is immunized with a polypeptide of the present invention or, more preferably, with a secreted polypeptide of the present invention-expressing cell. Such polypeptide-expressing cells are cultured in any suitable tissue culture medium, preferably in Earle's modified Eagle's medium supplemented with 10% fetal bovine serum (inactivated at about 56° C.), and supplemented with about 10 g/l of nonessential amino acids, about 1,000 U/ml of penicillin, and about 100 μg/ml of streptomycin.

[0931] The splenocytes of such mice are extracted and fused with a suitable myeloma cell line. Any suitable myeloma cell line may be employed in accordance with the present invention; however, it is preferable to employ the parent myeloma cell line (SP20), available from the ATCC. After fusion, the resulting hybridoma cells are selectively maintained in HAT medium, and then cloned by limiting dilution as described by Wands et al. (Gastroenterology 80:225-232 (1981)). The hybridoma cells obtained through such a selection are then assayed to identify clones which secrete antibodies capable of binding the polypeptide of the present invention.

[0932] Alternatively, additional antibodies capable of binding to polypeptide of the present invention can be produced in a two-step procedure using anti-idiotypic antibodies. Such a method makes use of the fact that antibodies are themselves antigens, and therefore, it is possible to obtain an antibody which binds to a second antibody. In accordance with this method, protein specific antibodies are used to immunize an animal, preferably a mouse. The splenocytes of such an animal are then used to produce hybridoma cells, and the hybridoma cells are screened to identify clones which produce an antibody whose ability to bind to the polypeptide of the present invention-specific antibody can be blocked by polypeptide of the present invention. Such antibodies comprise anti-idiotypic antibodies to the polypeptide of the present invention-specific antibody and are used to immunize an animal to induce formation of further polypeptide of the present invention-specific antibodies.

[0933] For in vivo use of antibodies in humans, an antibody is “humanized”. Such antibodies can be produced using genetic constructs derived from hybridoma cells producing the monoclonal antibodies described above. Methods for producing chimeric and humanized antibodies are known in the art and are discussed herein. (See, for review, Morrison, Science 229:1202 (1985); Oi et al., BioTechniques 4:214 (1986); Cabilly et al., U.S. Pat. No. 4,816,567; Taniguchi et al., EP 171496; Morrison et al., EP 173494; Neuberger et al., WO 8601533; Robinson et al., International Publication No. WO 8702671; Boulianne et al., Nature 312:643 (1984); Neuberger et al., Nature 314:268 (1985)).

[0934] b) Isolation of Antibody Fragments Directed Against Polypeptide of the Present Invention from a Library of scFvs

[0935] Naturally occurring V-genes isolated from human PBLs are constructed into a library of antibody fragments which contain reactivities against polypeptide of the present invention to which the donor may or may not have been exposed (see e.g., U.S. Pat. No. 5,885,793 incorporated herein by reference in its entirety).

[0936] Rescue of the Library. A library of scFvs is constructed from the RNA of human PBLs as described in International Publication No. WO 92/01047. To rescue phage displaying antibody fragments, approximately 10⁹ E. coli harboring the phagemid are used to inoculate 50 ml of 2×TY containing 1% glucose and 100 μg/ml of ampicillin (2×TY-AMP-GLU) and grown to an O.D. of 0.8 with shaking. Five ml of this culture is used to inoculate 50 ml of 2×TY-AMP-GLU, 2×10⁸ TU of delta gene 3 helper (M13 delta gene III, see International Publication No. WO 92/01047) are added and the culture incubated at 37° C. for 45 minutes without shaking and then at 37° C. for 45 minutes with shaking. The culture is centrifuged at 4000 r.p.m. for 10 min. and the pellet resuspended in 2 liters of 2×TY containing 100 μg/ml ampicillin and 50 ug/ml kanamycin and grown overnight. Phage are prepared as described in International Publication No. WO 92/01047.

[0937] M13 delta gene III is prepared as follows: M13 delta gene III helper phage does not encode gene III protein, hence the phage(mid) displaying antibody fragments have a greater avidity of binding to antigen. Infectious M13 delta gene III particles are made by growing the helper phage in cells harboring a pUC19 derivative supplying the wild type gene III protein during phage morphogenesis. The culture is incubated for 1 hour at 37° C. without shaking and then for a further hour at 37° C. with shaking. Cells are spun down (IEC-Centra 8,400 r.p.m. for 10 min), resuspended in 300 ml 2×TY broth containing 100 μg ampicillin/ml and 25 μg kanamycin/ml (2×TY-AMP-KAN) and grown overnight, shaking at 37° C. Phage particles are purified and concentrated from the culture medium by two PEG-precipitations (Sambrook et al., 1990), resuspended in 2 ml PBS and passed through a 0.45 μm filter (Minisart NML; Sartorius) to give a final concentration of approximately 10¹³ transducing units/ml (ampicillin-resistant clones).

[0938] Panning of the Library. Immunotubes (Nunc) are coated overnight in PBS with 4 ml of either 100 μg/ml or 10 μg/ml of a polypeptide of the present invention. Tubes are blocked with 2% Marvel-PBS for 2 hours at 37° C. and then washed 3 times in PBS. Approximately 10¹³ TU of phage is applied to the tube and incubated for 30 minutes at room temperature tumbling on an over and under turntable and then left to stand for another 1.5 hours. Tubes are washed 10 times with PBS 0.1% Tween-20 and 10 times with PBS. Phage are eluted by adding 1 ml of 100 mM triethylamine and rotating 15 minutes on an under and over turntable after which the solution is immediately neutralized with 0.5 ml of 1.0M Tris-HCl, pH 7.4. Phage are then used to infect 10 ml of mid-log E. coli TG1 by incubating eluted phage with bacteria for 30 minutes at 37° C. The E. coli are then plated on TYE plates containing 1% glucose and 100 μg/ml ampicillin. The resulting bacterial library is then rescued with delta gene 3 helper phage as described above to prepare phage for a subsequent round of selection. This process is then repeated for a total of 4 rounds of affinity purification with tube-washing increased to 20 times with PBS, 0.1% Tween-20 and 20 times with PBS for rounds 3 and 4.

[0939] Characterization of Binders. Eluted phage from the 3rd and 4th rounds of selection are used to infect E. coli HB 2151 and soluble scFv is produced (Marks, et al., 1991) from single colonies for assay. ELISAs are performed with microtitre plates coated with either 10 pg/ml of the polypeptide of the present invention in 50 mM bicarbonate pH 9.6. Clones positive in ELISA are further characterized by PCR fingerprinting (see, e.g., International Publication No. WO 92/01047) and then by sequencing. These ELISA positive clones may also be further characterized by techniques known in the art, such as, for example, epitope mapping, binding affinity, receptor signal transduction, ability to block or competitively inhibit antibody/antigen binding, and competitive agonistic or antagonistic activity.

### Example 11

### Method of Determining Alterations in a Gene Corresponding to a Polynucleotide

[0940] RNA isolated from entire families or individual patients presenting with a phenotype of interest (such as a disease) is isolated. cDNA is then generated from these RNA samples using protocols known in the art. (See, Sambrook.) The cDNA is then used as a template for PCR, employing primers surrounding regions of interest in SEQ ID NO:X; and/or the nucleotide sequence of the cDNA contained in Clone ID NO:Z. Suggested PCR conditions consist of 35 cycles at 95 degrees C. for 30 seconds; 60-120 seconds at 52-58 degrees C.; and 60-120 seconds at 70 degrees C., using buffer solutions described in Sidransky et al., Science 252:706 (1991).

[0941] PCR products are then sequenced using primers labeled at their 5′ end with T4 polynucleotide kinase, employing SequiTherm Polymerase (Epicentre Technologies). The intron-exon boundaries of selected exons is also determined and genomic PCR products analyzed to confirm the results. PCR products harboring suspected mutations are then cloned and sequenced to validate the results of the direct sequencing.

[0942] PCR products are cloned into T-tailed vectors as described in Holton et al., Nucleic Acids Research, 19:1156 (1991) and sequenced with T7 polymerase (United States Biochemical). Affected individuals are identified by mutations not present in unaffected individuals.

[0943] Genomic rearrangements are also observed as a method of determining alterations in a gene corresponding to a polynucleotide. Genomic clones isolated according to Example 2 are nick-translated with digoxigenindeoxy-uridine 5′-triphosphate (Boehringer Manheim), and FISH performed as described in Johnson et al., Methods Cell Biol. 35:73-99 (1991). Hybridization with the labeled probe is carried out using a vast excess of human cot-1 DNA for specific hybridization to the corresponding genomic locus.

[0944] Chromosomes are counterstained with 4,6-diamino-2-phenylidole and propidium iodide, producing a combination of C- and R-bands. Aligned images for precise mapping are obtained using a triple-band filter set (Chroma Technology, Brattleboro, Vt.) in combination with a cooled charge-coupled device camera (Photometrics, Tucson, Ariz.) and variable excitation wavelength filters. (Johnson et al., Genet. Anal. Tech. Appl., 8:75 (1991)). Image collection, analysis and chromosomal fractional length measurements are performed using the ISee Graphical Program System. (Inovision Corporation, Durham, N.C.) Chromosome alterations of the genomic region hybridized by the probe are identified as insertions, deletions, and translocations. These alterations are used as a diagnostic marker for an associated disease.

### Example 12

### Method of Detecting Abnormal Levels of a Polypeptide in a Biological Sample

[0945] A polypeptide of the present invention can be detected in a biological sample, and if an increased or decreased level of the polypeptide is detected, this polypeptide is a marker for a particular phenotype. Methods of detection are numerous, and thus, it is understood that one skilled in the art can modify the following assay to fit their particular needs.

[0946] For example, antibody-sandwich ELISAs are used to detect polypeptides in a sample, preferably a biological sample. Wells of a microtiter plate are coated with specific antibodies, at a final concentration of 0.2 to 10 ug/ml. The antibodies are either monoclonal or polyclonal and are produced by the method described in Example 10. The wells are blocked so that non-specific binding of the polypeptide to the well is reduced.

[0947] The coated wells are then incubated for >2 hours at RT with a sample containing the polypeptide. Preferably, serial dilutions of the sample should be used to validate results. The plates are then washed three times with deionized or distilled water to remove unbound polypeptide.

[0948] Next, 50 ul of specific antibody-alkaline phosphatase conjugate, at a concentration of 25-400 ng, is added and incubated for 2 hours at room temperature. The plates are again washed three times with deionized or distilled water to remove unbound conjugate.

[0949] Add 75 ul of 4-methylumbelliferyl phosphate (MUP) or p-nitrophenyl phosphate (NPP) substrate solution to each well and incubate 1 hour at room temperature. Measure the reaction by a microtiter plate reader. Prepare a standard curve, using serial dilutions of a control sample, and plot polypeptide concentration on the X-axis (log scale) and fluorescence or absorbance of the Y-axis (linear scale). Interpolate the concentration of the polypeptide in the sample using the standard curve.

### Example 13

### Formulation

[0950] The invention also provides methods of treatment and/or prevention of diseases or disorders (such as, for example, any one or more of the diseases or disorders disclosed herein) by administration to a subject of an effective amount of a Therapeutic. By therapeutic is meant polynucleotides or polypeptides of the invention (including fragments and variants), agonists or antagonists thereof, and/or antibodies thereto, in combination with a pharmaceutically acceptable carrier type (e.g., a sterile carrier).

[0951] The Therapeutic will be formulated and dosed in a fashion consistent with good medical practice, taking into account the clinical condition of the individual patient (especially the side effects of treatment with the Therapeutic alone), the site of delivery, the method of administration, the scheduling of administration, and other factors known to practitioners. The “effective amount” for purposes herein is thus determined by such considerations.

[0952] As a general proposition, the total pharmaceutically effective amount of the Therapeutic administered parenterally per dose will be in the range of about 1 ug/kg/day to 10 mg/kg/day of patient body weight, although, as noted above, this will be subject to therapeutic discretion. More preferably, this dose is at least 0.01 mg/kg/day, and most preferably for humans between about 0.01 and 1 mg/kg/day for the hormone. If given continuously, the Therapeutic is typically administered at a dose rate of about 1 ug/kg/hour to about 50 ug/kg/hour, either by 1-4 injections per day or by continuous subcutaneous infusions, for example, using a mini-pump. An intravenous bag solution may also be employed. The length of treatment needed to observe changes and the interval following treatment for responses to occur appears to vary depending on the desired effect.

[0953] Therapeutics can be are administered orally, rectally, parenterally, intracistemally, intravaginally, intraperitoneally, topically (as by powders, ointments, gels, drops or transdermal patch), bucally, or as an oral or nasal spray. “Pharmaceutically acceptable carrier” refers to a non-toxic solid, semisolid or liquid filler, diluent, encapsulating material or formulation auxiliary of any. The term “parenteral” as used herein refers to modes of administration which include intravenous, intramuscular, intraperitoneal, intrastemal, subcutaneous and intraarticular injection and infusion.

[0954] Therapeutics of the invention are also suitably administered by sustained-release systems. Suitable examples of sustained-release Therapeutics are administered orally, rectally, parenterally, intracistemally, intravaginally, intraperitoneally, topically (as by powders, ointments, gels, drops or transdermal patch), bucally, or as an oral or nasal spray. “Pharmaceutically acceptable carrier” refers to a non-toxic solid, semisolid or liquid filler, diluent, encapsulating material or formulation auxiliary of any type. The term “parenteral” as used herein refers to modes of administration which include intravenous, intramuscular, intraperitoneal, intrastemal, subcutaneous and intraarticular injection and infusion.

[0955] Therapeutics of the invention are also suitably administered by sustained-release systems. Suitable examples of sustained-release Therapeutics include suitable polymeric materials (such as, for example, semi-permeable polymer matrices in the form of shaped articles, e.g., films, or mirocapsules), suitable hydrophobic materials (for example as an emulsion in an acceptable oil) or ion exchange resins, and sparingly soluble derivatives (such as, for example, a sparingly soluble salt).

[0956] Sustained-release matrices include polylactides (U.S. Pat. No. 3,773,919, EP 58,481), copolymers of L-glutamic acid and gamma-ethyl-L-glutamate (Sidman et al., Biopolymers 22:547-556 (1983)), poly (2-hydroxyethyl methacrylate) (Langer et al., J. Biomed. Mater. Res. 15:167-277 (1981), and Langer, Chem. Tech. 12:98-105 (1982)), ethylene vinyl acetate (Langer et al., Id.) or poly-D-(−)-3-hydroxybutyric acid (EP 133,988).

[0957] Sustained-release Therapeutics also include liposomally entrapped Therapeutics of the invention (see generally, Langer, Science 249:1527-1533 (1990); Treat et al., in Liposomes in the Therapy of Infectious Disease and Cancer, Lopez-Berestein and Fidler (eds.), Liss, New York, pp. 317-327 and 353-365 (1989)). Liposomes containing the Therapeutic are prepared by methods known per se: DE 3,218,121; Epstein et al., Proc. Natl. Acad. Sci. (USA) 82:3688-3692 (1985); Hwang et al., Proc. Natl. Acad. Sci.(USA) 77:4030-4034 (1980); EP 52,322; EP 36,676; EP 88,046; EP 143,949; EP 142,641; Japanese Pat. Appl. 83-118008; U.S. Pat. Nos. 4,485,045 and 4,544,545; and EP 102,324. Ordinarily, the liposomes are of the small (about 200-800 Angstroms) unilamellar type in which the lipid content is greater than about 30 mol. percent cholesterol, the selected proportion being adjusted for the optimal Therapeutic.

[0958] In yet an additional embodiment, the Therapeutics of the invention are delivered by way of a pump (see Langer, supra; Sefton, CRC Crit. Ref. Biomed. Eng. 14:201 (1987); Buchwald et al., Surgery 88:507 (1980); Saudek et al., N. Engl. J. Med. 321:574 (1989)).

[0959] Other controlled release systems are discussed in the review by Langer (Science 249:1527-1533 (1990)).

[0960] For parenteral administration, in one embodiment, the Therapeutic is formulated generally by mixing it at the desired degree of purity, in a unit dosage injectable form (solution, suspension, or emulsion), with a pharmaceutically acceptable carrier, i.e., one that is non-toxic to recipients at the dosages and concentrations employed and is compatible with other ingredients of the formulation. For example, the formulation preferably does not include oxidizing agents and other compounds that are known to be deleterious to the Therapeutic.

[0961] Generally, the formulations are prepared by contacting the Therapeutic uniformly and intimately with liquid carriers or finely divided solid carriers or both. Then, if necessary, the product is shaped into the desired formulation. Preferably the carrier is a parenteral carrier, more preferably a solution that is isotonic with the blood of the recipient. Examples of such carrier vehicles include water, saline, Ringer's solution, and dextrose solution. Non-aqueous vehicles such as fixed oils and ethyl oleate are also useful herein, as well as liposomes.

[0962] The carrier suitably contains minor amounts of additives such as substances that enhance isotonicity and chemical stability. Such materials are non-toxic to recipients at the dosages and concentrations employed, and include buffers such as phosphate, citrate, succinate, acetic acid, and other organic acids or their salts; antioxidants such as ascorbic acid; low molecular weight (less than about ten residues) polypeptides, e.g., polyarginine or tripeptides; proteins, such as serum albumin, gelatin, or immunoglobulins; hydrophilic polymers such as polyvinylpyrrolidone; amino acids, such as glycine, glutamic acid, aspartic acid, or arginine; monosaccharides, disaccharides, and other carbohydrates including cellulose or its derivatives, glucose, manose, or dextrins; chelating agents such as EDTA; sugar alcohols such as mannitol or sorbitol; counterions such as sodium; and/or nonionic surfactants such as polysorbates, poloxamers, or PEG.

[0963] The Therapeutic is typically formulated in such vehicles at a concentration of about 0.1 mg/ml to 100 mg/ml, preferably 1-10 mg/ml, at a pH of about 3 to 8. It will be understood that the use of certain of the foregoing excipients, carriers, or stabilizers will result in the formation of polypeptide salts.

[0964] Any pharmaceutical used for therapeutic administration can be sterile. Sterility is readily accomplished by filtration through sterile filtration membranes (e.g., 0.2 micron membranes). Therapeutics generally are placed into a container having a sterile access port, for example, an intravenous solution bag or vial having a stopper pierceable by a hypodermic injection needle.

[0965] Therapeutics ordinarily will be stored in unit or multi-dose containers, for example, sealed ampoules or vials, as an aqueous solution or as a lyophilized formulation for reconstitution. As an example of a lyophilized formulation, 10-ml vials are filled with 5 ml of sterile-filtered 1% (w/v) aqueous Therapeutic solution, and the resulting mixture is lyophilized. The infusion solution is prepared by reconstituting the lyophilized Therapeutic using bacteriostatic Water-for-Injection.

[0966] The invention also provides a pharmaceutical pack or kit comprising one or more containers filled with one or more of the ingredients of the Therapeutics of the invention. Associated with such container(s) can be a notice in the form prescribed by a governmental agency regulating the manufacture, use or sale of pharmaceuticals or biological products, which notice reflects approval by the agency of manufacture, use or sale for human administration. In addition, the Therapeutics may be employed in conjunction with other therapeutic compounds.

[0967] The Therapeutics of the invention may be administered alone or in combination with adjuvants. Adjuvants that may be administered with the Therapeutics of the invention include, but are not limited to, alum, alum plus deoxycholate (ImmunoAg), MTP-PE (Biocine Corp.), QS21 (Genentech, Inc.), BCG (e.g., THERACYS®), MPL and nonviable prepartions of Corynebacterium parvum. In a specific embodiment, Therapeutics of the invention are administered in combination with alum. In another specific embodiment, Therapeutics of the invention are administered in combination with QS-21. Further adjuvants that may be administered with the Therapeutics of the invention include, but are not limited to, Monophosphoryl lipid immunomodulator, AdjuVax lOa, QS-21, QS-18, CRL1005, Aluminum salts, MF-59, and Virosomal adjuvant technology. Vaccines that may be administered with the Therapeutics of the invention include, but are not limited to, vaccines directed toward protection against MMR (measles, mumps, rubella), polio, varicella, tetanus/diptheria, hepatitis A, hepatitis B, haemophilus influenzae B, whooping cough, pneumonia, influenza, Lyme's Disease, rotavirus, cholera, yellow fever, Japanese encephalitis, poliomyelitis, rabies, typhoid fever, and pertussis. Combinations may be administered either concomitantly, e.g., as an admixture, separately but simultaneously or concurrently; or sequentially. This includes presentations in which the combined agents are administered together as a therapeutic mixture, and also procedures in which the combined agents are administered separately but simultaneously, e.g., as through separate intravenous lines into the same individual. Administration “in combination” further includes the separate administration of one of the compounds or agents given first, followed by the second.

[0968] The Therapeutics of the invention may be administered alone or in combination with other therapeutic agents. Therapeutic agents that may be administered in combination with the Therapeutics of the invention, include but are not limited to psychotherapeutic agents (e.g., antipsychotic agents, antimanic agents, antidepressants, antianxiety agents, and stimulants), anti-epileptics, antiparkinsonian agents, ALS therapeutics, steroidal and non-steroidal anti-inflammatory agents, anticaogulation and thrombolytic agents, chemotherapeutic agents, cytokines and/or growth factors, antiviral agents, members of the TNF family, antibiotics, and/or conventional immunotherapeutic agents. Combinations may be administered either concomitantly, e.g., as an admixture, separately but simultaneously or concurrently; or sequetially. This includes presentations in which the combined agents are administered together as a therapeutic mixture, and also procedures in which the combined agents are administered separately but simultaneously, e.g., as through separate intravenous lines into the same individual. Administration “in combination” further includes the separate administration of one of the compounds or agents given first, followed by the second.

[0969] In one embodiment, the Therapeutics of the invention are administered in combination with an anticoagulant. Anticoagulants that may be administered with the compositions of the invention include, but are not limited to, heparin, low molecular weight heparin, warfarin sodium (e.g., COUMADIN®), dicumarol, 4-hydroxycoumarin, anisindione (e.g., MIRADON™), acenocoumarol (e.g., nicoumalone, SINTHROME™), indan-1,3-dione, phenprocoumon (e.g., MARCUMAR™), ethyl biscoumacetate (e.g., TROMEXAN™), and aspirin. In a specific embodiment, compositions of the invention are administered in combination with heparin and/or warfarin. In another specific embodiment, compositions of the invention are administered in combination with warfarin. In another specific embodiment, compositions of the invention are administered in combination with warfarin and aspirin. In another specific embodiment, compositions of the invention are administered in combination with heparin. In another specific embodiment, compositions of the invention are administered in combination with heparin and aspirin.

[0970] In another embodiment, the Therapeutics of the invention are administered in combination with thrombolytic drugs. Thrombolytic drugs that may be administered with the compositions of the invention include, but are not limited to, plasminogen, lys-plasminogen, alpha2-antiplasmin, streptokinae (e.g., KABIKINASE™), antiresplace (e.g., EMINASE™), tissue plasminogen activator (t-PA, altevase, ACTIVASE™), urokinase (e.g., ABBOKINASE™), sauruplase, (Prourokinase, single chain urokinase), and aminocaproic acid (e.g., AMICAR™). In a specific embodiment, compositions of the invention are administered in combination with tissue plasminogen activator and aspirin.

[0971] In another embodiment, the Therapeutics of the invention are administered in combination with antiplatelet drugs. Antiplatelet drugs that may be administered with the compositions of the invention include, but are not limited to, aspirin, dipyridamole (e.g., PERSANTINE™), and ticlopidine (e.g., TICLID™).

[0972] In specific embodiments, the use of anti-coagulants, thrombolytic and/or antiplatelet drugs in combination with Therapeutics of the invention is contemplated for the prevention, diagnosis, and/or treatment of thrombosis, arterial thrombosis, venous thrombosis, thromboembolism, pulmonary embolism, atherosclerosis, myocardial infarction, transient ischemic attack, unstable angina. In specific embodiments, the use of anticoagulants, thrombolytic drugs and/or antiplatelet drugs in combination with Therapeutics of the invention is contemplated for the prevention of occulsion of saphenous grafts, for reducing the risk of periprocedural thrombosis as might accompany angioplasty procedures, for reducing the risk of stroke in patients with atrial fibrillation including nonrheumatic atrial fibrillation, for reducing the risk of embolism associated with mechanical heart valves and or mitral valves disease. Other uses for the therapeutics of the invention, alone or in combination with antiplatelet, anticoagulant, and/or thrombolytic drugs, include, but are not limited to, the prevention of occlusions in extracorporeal devices (e.g., intravascular canulas, vascular access shunts in hemodialysis patients, hemodialysis machines, and cardiopulmonary bypass machines).

[0973] In certain embodiments, Therapeutics of the invention are administered in combination with antiretroviral agents, nucleoside/nucleotide reverse transcriptase inhibitors (NRTIs), non-nucleoside reverse transcriptase inhibitors (NNRTIs), and/or protease inhibitors (PIs). NRTIs that may be administered in combination with the Therapeutics of the invention, include, but are not limited to, RETROVIR™ (zidovudine/AZT), VIDEX™ (didanosine/ddI), HIVID™ (zalcitabine/ddC), ZERIT™ (stavudine/d4T), EPIVIR™ (lamivudine/3TC), and COMBIVIR™ (zidovudine/lamivudine). NNRTIs that may be administered in combination with the Therapeutics of the invention, include, but are not limited to, VIRAMUNE™ (nevirapine), RESCRIPTOR™ (delavirdine), and SUSTIVA™ (efavirenz). Protease inhibitors that may be administered in combination with the Therapeutics of the invention, include, but are not limited to, CRIXIVAN™ (indinavir), NORVIR™ (ritonavir), INVIRASE™ (saquinavir), and VIRACEPT™ (nelfinavir). In a specific embodiment, antiretroviral agents, nucleoside reverse transcriptase inhibitors, non-nucleoside reverse transcriptase inhibitors, and/or protease inhibitors may be used in any combination with Therapeutics of the invention to treat AIDS and/or to prevent or treat HIV infection.

[0974] Additional NRTIs include LODENOSINE™ (F-ddA; an acid-stable adenosine NRTI; Triangle/Abbott; COVIRACIL™ (emtricitabine/FTC; structurally related to lamivudine (3TC) but with 3- to 10-fold greater activity in vitro; Triangle/Abbott); dOTC (BCH-10652, also structurally related to lamivudine but retains activity against a substantial proportion of lamivudine-resistant isolates; Biochem Pharma); Adefovir (refused approval for anti-HIV therapy by FDA; Gilead Sciences); PREVEON® (Adefovir Dipivoxil, the active prodrug of adefovir; its active form is PMEA-pp); TENOFOVIR™ (bis-POC PMPA, a PMPA prodrug; Gilead); DAPD/DXG (active metabolite of DAPD; Triangle/Abbott); D-D4FC (related to 3TC, with activity against AZT/3TC-resistant virus); GW420867X (Glaxo Wellcome); ZIAGEN™ (abacavir/159U89; Glaxo Wellcome Inc.); CS-87 (3′azido-2′,3′-dideoxyuridine; WO 99/66936); and S-acyl-2-thioethyl (SATE)-bearing prodrug forms of β-L-FD4C and β-L-FddC (WO 98/17281).

[0975] Additional NNRTIs include COACTINON™ (Emivirine/MKC-442, potent NNRTI of the HEPT class; Triangle/Abbott); CAPRAVIRINE™ (AG-1549/S-1153, a next generation NNRTI with activity against viruses containing the K103N mutation; Agouron); PNU-142721 (has 20- to 50-fold greater activity than its predecessor delavirdine and is active against K103N mutants; Pharmacia & Upjohn); DPC-961 and DPC-963 (second-generation derivatives of efavirenz, designed to be active against viruses with the K103N mutation; DuPont); GW-420867×(has 25-fold greater activity than HBY097 and is active against K103N mutants; Glaxo Wellcome); CALANOLIDE A (naturally occurring agent from the latex tree; active against viruses containing either or both the Y181 C and K103N mutations); and Propolis (WO 99/49830).

[0976] Additional protease inhibitors include LOPINAVIR™ (ABT378/r; Abbott Laboratories); BMS-232632 (an azapeptide; Bristol-Myres Squibb); TIPRANAVIR™ (PNU-140690, a non-peptic dihydropyrone; Pharmacia & Upjohn); PD-178390 (a nonpeptidic dihydropyrone; Parke-Davis); BMS 232632 (an azapeptide; Bristol-Myers Squibb); L-756,423 (an indinavir analog; Merck); DMP-450 (a cyclic urea compound; Avid & DuPont); AG-1776 (a peptidomimetic with in vitro activity against protease inhibitor-resistant viruses; Agouron); VX-175/GW-433908 (phosphate prodrug of amprenavir; Vertex & Glaxo Welcome); CGP61755 (Ciba); and AGENERASE™ (amprenavir; Glaxo Wellcome Inc.).

[0977] Additional antiretroviral agents include fusion inhibitors/gp41 binders. Fusion inhibitors/gp41 binders include T-20 (a peptide from residues 643-678 of the HIV gp41 transmembrane protein ectodomain which binds to gp41 in its resting state and prevents transformation to the fusogenic state; Trimeris) and T-1249 (a second-generation fusion inhibitor; Trimeris).

[0978] Additional antiretroviral agents include fusion inhibitors/chemokine receptor antagonists. Fusion inhibitors/chemokine receptor antagonists include CXCR4 antagonists such as AMD 3100 (a bicyclam), SDF-1 and its analogs, and ALX40-4C (a cationic peptide), T22 (an 18 amino acid peptide; Trimeris) and the T22 analogs T134 and T140; CCR5 antagonists such as RANTES (9-68), AOP-RANTES, NNY-RANTES, and TAK-779; and CCR5/CXCR4 antagonists such as NSC 651016 (a distamycin analog). Also included are CCR2B, CCR3, and CCR6 antagonists. Chemokine recpetor agonists such as RANTES, SDF-1, MIP-1α, MIP-1β, etc., may also inhibit fusion.

[0979] Additional antiretroviral agents include integrase inhibitors. Integrase inhibitors include dicaffeoylquinic (DFQA) acids; L-chicoric acid (a dicaffeoyltartaric (DCTA) acid); quinalizarin (QLC) and related anthraquinones; ZINTEVIR™ (AR 177, an oligonucleotide that probably acts at cell surface rather than being a true integrase inhibitor; Arondex); and naphthols such as those disclosed in WO 98150347.

[0980] Additional antiretroviral agents include hydroxyurea-like compunds such as BCX-34 (a purine nucleoside phosphorylase inhibitor; Biocryst); ribonucleotide reductase inhibitors such as DIDOX™ (Molecules for Health); inosine monophosphate dehydrogenase (IMPDH) inhibitors sucha as VX-497 (Vertex); and mycopholic acids such as CellCept (mycophenolate mofetil; Roche).

[0981] Additional antiretroviral agents include inhibitors of viral integrase, inhibitors of viral genome nuclear translocation such as arylene bis(methylketone) compounds; inhibitors of HIV entry such as AOP-RANTES, NNY-RANTES, RANTES-IgG fusion protein, soluble complexes of RANTES and glycosaminoglycans (GAG), and AMD-3100; nucleocapsid zinc finger inhibitors such as dithiane compounds; targets of HIV Tat and Rev; and pharmacoenhancers such as ABT-378.

[0982] Other antiretroviral therapies and adjunct therapies include cytokines and lymphokines such as MIP-1α, MIP-1β, SDF-1α, IL-2, PROLEUKIN™ (aldesleukin/L2-7001; Chiron), IL-4, IL-10, IL-12, and IL-13; interferons such as IFN-α2a; antagonists of TNFs, NFκB, GM-CSF, M-CSF, and IL-10; agents that modulate immune activation such as cyclosporin and prednisone; vaccines such as Remune™ (HIV Immunogen), APL 400-003 (Apollon), recombinant gp120 and fragments, bivalent (B/E) recombinant envelope glycoprotein, rgp120CM235, MN rgp120, SF-2 rgp120, gp120/soluble CD4 complex, Delta JR-FL protein, branched synthetic peptide derived from discontinuous gp120 C3/C4 domain, fusion-competent immunogens, and Gag, Pol, Nef, and Tat vaccines; gene-based therapies such as genetic suppressor elements (GSEs; WO 98/54366), and intrakines (genetically modified CC chemokines targetted to the ER to block surface expression of newly synthesized CCR5 (Yang et al., PNAS 94:11567-72 (1997); Chen et al., Nat. Med. 3:1110-16 (1997)); antibodies such as the anti-CXCR4 antibody 12G5, the anti-CCR5 antibodies 2D7, 5C7, PA8, PA9, PA10, PA11, PA12, and PA14, the anti-CD4 antibodies Q4120 and RPA-T4, the anti-CCR3 antibody 7B11, the anti-gp120 antibodies 17b, 48d, 447-52D, 257-D, 268-D and 50.1, anti-Tat antibodies, anti-TNF-α antibodies, and monoclonal antibody 33A; aryl hydrocarbon (AH) receptor agonists and antagonists such as TCDD, 3,3′,4,4′,5-pentachlorobiphenyl, 3,3′,4,4′-tetrachlorobiphenyl, and α-naphthoflavone (WO 98/30213); and antioxidants such as γ-L-glutamyl-L-cysteine ethyl ester (γ-GCE; WO 99/56764).

[0983] In a further embodiment, the Therapeutics of the invention are administered in combination with an antiviral agent. Antiviral agents that may be administered with the Therapeutics of the invention include, but are not limited to, acyclovir, ribavirin, amantadine, and remantidine.

[0984] In other embodiments, Therapeutics of the invention may be administered in combination with anti-opportunistic infection agents. Anti-opportunistic agents that may be administered in combination with the Therapeutics of the invention, include, but are not limited to, TRIMETHOPRIM-SULFAMETHOXAZOLE™, DAPSONE™, PENTAMIDINE™, ATOVAQUONE™, ISONIAZID™ RIFAMPIN™, PYRAZINAMIDE™, ETHAMBUTOL™, RIFABUTIN™, CLARITHROMYCIN™, AZITHROMYCIN™, GANCICLOVIR™, FOSCARNET™, CIDOFOVIR™, FLUCONAZOLE™, ITRACONAZOLE™, KETOCONAZOLE™, ACYCLOVIR™, FAMCICOLVIR™, PYRIMETHAMINE™, LEUCOVORIN™, NEUPOGEN™ (filgrastim/G-CSF), and LEUKINE™ (sargramostim/GM-CSF). In a specific embodiment, Therapeutics of the invention are used in any combination with TRIMETHOPRIM-SULFAMETHOXAZOLE™, DAPSONE™, PENTAMIDINE™, and/or ATOVAQUONE™ to prophylactically treat or prevent an opportunistic Pneumocystis carinii pneumonia infection. In another specific embodiment, Therapeutics of the invention are used in any combination with ISONLAZID™, RIFAMPIN™, PYRAZINAMIDE™, and/or ETHAMBUTOL™ to prophylactically treat or prevent an opportunistic Mycobacterium avium complex infection. In another specific embodiment, Therapeutics of the invention are used in any combination with RIFABUTIN™, CLARITHROMYCIN™, and/or AZITHROMYCIN™ to prophylactically treat or prevent an opportunistic Mycobacterium tuberculosis infection. In another specific embodiment, Therapeutics of the invention are used in any combination with GANCICLOVIR™, FOSCARNET™, and/or CIDOFOVIR™ to prophylactically treat or prevent an opportunistic cytomegalovirus infection. In another specific embodiment, Therapeutics of the invention are used in any combination with FLUCONAZOLE™, ITRACONAZOLE™, and/or KETOCONAZOLE™ to prophylactically treat or prevent an opportunistic fungal infection. In another specific embodiment, Therapeutics of the invention are used in any combination with ACYCLOVIR™ and/or FAMCICOLVIR™ to prophylactically treat or prevent an opportunistic herpes simplex virus type I and/or type II infection. In another specific embodiment, Therapeutics of the invention are used in any combination with PYRIMETHAMINE™ and/or LEUCOVORIN™ to prophylactically treat or prevent an opportunistic Toxoplasma gondii infection. In another specific embodiment, Therapeutics of the invention are used in any combination with LEUCOVORIN™ and/or NEUPOGEN™ to prophylactically treat or prevent an opportunistic bacterial infection.

[0985] In a further embodiment, the Therapeutics of the invention are administered in combination with an antibiotic agent. Antibiotic agents that may be administered with the Therapeutics of the invention include, but are not limited to, amoxicillin, beta-lactamases, aminoglycosides, beta-lactam (glycopeptide), beta-lactamases, Clindamycin, chloramphenicol, cephalosporins, ciprofloxacin, erythromycin, fluoroquinolones, macrolides, metronidazole, penicillins, quinolones, rapamycin, rifampin, streptomycin, sulfonamide, tetracyclines, trimethoprim, trimethoprim-sulfamethoxazole, and vancomycin.

[0986] In other embodiments, the Therapeutics of the invention are administered in combination with immunestimulants. Immunostimulants that may be administered in combination with the Therapeutics of the invention include, but are not limited to, levamisole (e.g., ERGAMISOL™), isoprinosine (e.g. INOSIPLEX™), interferons (e.g. interferon alpha), and interleukins (e.g., IL-2).

[0987] In other embodiments, Therapeutics of the invention are administered in combination with immunosuppressive agents. Immunosuppressive agents that may be administered in combination with the Therapeutics of the invention include, but are not limited to, steroids, cyclosporine, cyclosporine analogs, cyclophosphamide methylprednisone, prednisone, azathioprine, FK-506, 15-deoxyspergualin, and other immunosuppressive agents that act by suppressing the function of responding T cells. Other immunosuppressive agents that may be administered in combination with the Therapeutics of the invention include, but are not limited to, prednisolone, methotrexate, thalidomide, methoxsalen, rapamycin, leflunomide, mizoribine (BREDININ™), brequinar, deoxyspergualin, and azaspirane (SKF 105685), ORTHOCLONE OKT® 3 (muromonab-CD3), SANDIMMUNE™, NEORAL™, SANGDYA™ (cyclosporine), PROGRAF® (FK506, tacrolimus), CELLCEPT® (mycophenolate motefil, of which the active metabolite is mycophenolic acid), IMURAN™ (azathioprine), glucocorticosteroids, adrenocortical steroids such as DELTASONE™ (prednisone) and HYDELTRASOL™ (prednisolone), FOLEX™ and MEXATE™ (methotrxate), OXSORALEN-ULTRA™ (methoxsalen) and RAPAMUNE™ (sirolimus). In a specific embodiment, immunosuppressants may be used to prevent rejection of organ or bone marrow transplantation.

[0988] In an additional embodiment, Therapeutics of the invention are administered alone or in combination with one or more intravenous immune globulin preparations. Intravenous immune globulin preparations that may be administered with the Therapeutics of the invention include, but not limited to, GAMMAR™, IVEEGAM™, SANDOGLOBULIN™, GAMMAGARD S/D™, ATGAM™ (antithymocyte glubulin), and GAMIMUNE™. In a specific embodiment, Therapeutics of the invention are administered in combination with intravenous immune globulin preparations in transplantation therapy (e.g., bone marrow transplant).

[0989] In certain embodiments, the Therapeutics of the invention are administered alone or in combination with an anti-inflammatory agent. Anti-inflammatory agents that may be administered with the Therapeutics of the invention include, but are not limited to, corticosteroids (e.g. betamethasone, budesonide, cortisone, dexamethasone, hydrocortisone, methylprednisolone, prednisolone, prednisone, and triamcinolone), nonsteroidal anti-inflammatory drugs (e.g., diclofenac, diflunisal, etodolac, fenoprofen, floctafenine, flurbiprofen, ibuprofen, indomethacin, ketoprofen, meclofenamate, mefenamic acid, meloxicam, nabumetone, naproxen, oxaprozin, phenylbutazone, piroxicam, sulindac, tenoxicam, tiaprofenic acid, and tolmetin.), as well as antihistamines, aminoarylcarboxylic acid derivatives, arylacetic acid derivatives, arylbutyric acid derivatives, arylcarboxylic acids, arylpropionic acid derivatives, pyrazoles, pyrazolones, salicylic acid derivatives, thiazinecarboxamides, e-acetamidocaproic acid, S-adenosylmethionine, 3-amino-4-hydroxybutyric acid, amixetrine, bendazac, benzydamine, bucolome, difenpiramide, ditazol, emorfazone, guaiazulene, nabumetone, nimesulide, orgotein, oxaceprol, paranyline, perisoxal, pifoxime, proquazone, proxazole, and tenidap.

[0990] In an additional embodiment, the compositions of the invention are administered alone or in combination with an anti-angiogenic agent. Anti-angiogenic agents that may be administered with the compositions of the invention include, but are not limited to, Angiostatin (Entremed, Rockville, Md.), Troponin-1 (Boston Life Sciences, Boston, Mass.), anti-Invasive Factor, retinoic acid and derivatives thereof, paclitaxel (Taxol), Suramin, Tissue Inhibitor of Metalloproteinase-1, Tissue Inhibitor of Metalloproteinase-2, VEGI, Plasminogen Activator Inhibitor-1, Plasminogen Activator Inhibitor-2, and various forms of the lighter “d group” transition metals.

[0991] Lighter “d group” transition metals include, for example, vanadium, molybdenum, tungsten, titanium, niobium, and tantalum species. Such transition metal species may form transition metal complexes. Suitable complexes of the above-mentioned transition metal species include oxo transition metal complexes.

[0992] Representative examples of vanadium complexes include oxo vanadium complexes such as vanadate and vanadyl complexes. Suitable vanadate complexes include metavanadate and orthovanadate complexes such as, for example, ammonium metavanadate, sodium metavanadate, and sodium orthovanadate. Suitable vanadyl complexes include, for example, vanadyl acetylacetonate and vanadyl sulfate including vanadyl sulfate hydrates such as vanadyl sulfate mono- and trihydrates.

[0993] Representative examples of tungsten and molybdenum complexes also include oxo complexes. Suitable oxo tungsten complexes include tungstate and tungsten oxide complexes. Suitable tungstate complexes include ammonium tungstate, calcium tungstate, sodium tungstate dihydrate, and tungstic acid. Suitable tungsten oxides include tungsten (IV) oxide and tungsten (VI) oxide. Suitable oxo molybdenum complexes include molybdate, molybdenum oxide, and molybdenyl complexes. Suitable molybdate complexes include ammonium molybdate and its hydrates, sodium molybdate and its hydrates, and potassium molybdate and its hydrates. Suitable molybdenum oxides include molybdenum (VI) oxide, molybdenum (VI) oxide, and molybdic acid. Suitable molybdenyl complexes include, for example, molybdenyl acetylacetonate. Other suitable tungsten and molybdenum complexes include hydroxo derivatives derived from, for example, glycerol, tartaric acid, and sugars.

[0994] A wide variety of other anti-angiogenic factors may also be utilized within the context of the present invention. Representative examples include, but are not limited to, platelet factor 4; protamine sulphate; sulphated chitin derivatives (prepared from queen crab shells), (Murata et al., Cancer Res. 51:22-26, (1991)); Sulphated Polysaccharide Peptidoglycan Complex (SP-PG) (the function of this compound may be enhanced by the presence of steroids such as estrogen, and tamoxifen citrate); Staurosporine; modulators of matrix metabolism, including for example, proline analogs, cishydroxyproline, d,L-3,4-dehydroproline, Thiaproline, alpha,alpha-dipyridyl, aminopropionitrile fumarate; 4-propyl-5-(4-pyridinyl)-2(3H)-oxazolone; Methotrexate; Mitoxantrone; Heparin; Interferons; 2 Macroglobulin-serum; ChIMP-3 (Pavloff et al., J. Bio. Chem. 267:17321-17326, (1992)); Chymostatin (Tomkinson et al., Biochem J. 286:475-480, (1992)); Cyclodextrin Tetradecasulfate; Eponemycin; Camptothecin; Fumagillin (Ingber et al., Nature 348:555-557, (1990)); Gold Sodium Thiomalate (“GST”; Matsubara and Ziff, J. Clin. Invest. 79:1440-1446, (1987)); anticollagenase-serum; alpha2-antiplasmin (Holmes et al., J. Biol. Chem. 262(4):1659-1664, (1987)); Bisantrene (National Cancer Institute); Lobenzarit disodium (N-(2)-carboxyphenyl-4-chloroanthronilic acid disodium or “CCA”; (Takeuchi et al., Agents Actions 36:312-316, (1992)); and metalloproteinase inhibitors such as BB94.

[0995] Additional anti-angiogenic factors that may also be utilized within the context of the present invention include Thalidomide, (Celgene, Warren, N.J.); Angiostatic steroid; AGM-1470 (H. Brem and J. Folkman J Pediatr. Surg. 28:445-51 (1993)); an integrin alpha v beta 3 antagonist (C. Storgard et al., J. Clin. Invest. 103:47-54 (1999)); carboxynaminolmidazole; Carboxyamidotriazole (CAI) (National Cancer Institute, Bethesda, Md.); Conbretastatin A-4 (CA4P) (OXiGENE, Boston, Mass.); Squalamine (Magainin Pharmaceuticals, Plymouth Meeting, Pa.); TNP-470, (Tap Pharmaceuticals, Deerfield, Ill.); ZD-0101 AstraZeneca (London, UK); APRA (CT2584); Benefin, Byrostatin-1 (SC339555); CGP-41251 (PKC 412); CM101; Dexrazoxane (ICRF187); DMXAA; Endostatin; Flavopridiol; Genestein; GTE; lInmTher; Iressa (ZD1839); Octreotide (Somatostatin); Panretin; Penacillamine; Photopoint; PI-88; Prinomastat (AG-3340) Purlytin; Suradista (FCE26644); Tamoxifen (Nolvadex); Tazarotene; Tetrathiomolybdate; Xeloda (Capecitabine); and 5-Fluorouracil.

[0996] Anti-angiogenic agents that may be administed in combination with the compounds of the invention may work through a variety of mechanisms including, but not limited to, inhibiting proteolysis of the extracellular matrix, blocking the function of endothelial cell-extracellular matrix adhesion molecules, by antagonizing the function of angiogenesis inducers such as growth factors, and inhibiting integrin receptors expressed on proliferating endothelial cells. Examples of anti-angiogenic inhibitors that interfere with extracellular matrix proteolysis and which may be administered in combination with the compositons of the invention include, but are not lmited to, AG-3340 (Agouron, La Jolla, Calif.), BAY-12-9566 (Bayer, West Haven, Conn.), BMS-275291 (Bristol Myers Squibb, Princeton, N.J.), CGS-27032A (Novartis, East Hanover, N.J.), Marimastat (British Biotech, Oxford, UK), and Metastat (Aeterna, St-Foy, Quebec). Examples of anti-angiogenic inhibitors that act by blocking the function of endothelial cell-extracellular matrix adhesion molecules and which may be administered in combination with the compositons of the invention include, but are not Imited to, EMD-121974 (Merck KcgaA Darmstadt, Germany) and Vitaxin (Ixsys, La Jolla, Calif./Medimmune, Gaithersburg, Md.). Examples of anti-angiogenic agents that act by directly antagonizing or inhibiting angiogenesis inducers and which may be administered in combination with the compositons of the invention include, but are not lmited to, Angiozyme (Ribozyme, Boulder, Colo.), Anti-VEGF antibody (Genentech, S. San Francisco, Calif.), PTK-787/ZK-225846 (Novartis, Basel, Switzerland), SU-101 (Sugen, S. San Francisco, Calif.), SU-5416 (Sugen/Pharmacia Upjohn, Bridgewater, N.J.), and SU-6668 (Sugen). Other anti-angiogenic agents act to indirectly inhibit angiogenesis. Examples of indirect inhibitors of angiogenesis which may be administered in combination with the compositons of the invention include, but are not limited to, IM-862 (Cytran, Kirkland, Wash.), Interferon-alpha, IL-12 (Roche, Nutley, N.J.), and Pentosan polysulfate (Georgetown University, Washington, D.C.).

[0997] In particular embodiments, the use of compositions of the invention in combination with anti-angiogenic agents is contemplated for the treatment, prevention, and/or amelioration of an autoimmune disease, such as for example, an autoimmune disease described herein.

[0998] In a particular embodiment, the use of compositions of the invention in combination with anti-angiogenic agents is contemplated for the treatment, prevention, and/or amelioration of arthritis. In a more particular embodiment, the use of compositions of the invention in combination with anti-angiogenic agents is contemplated for the treatment, prevention, and/or amelioration of rheumatoid arthritis.

[0999] In another embodiment, the polynucleotides encoding a polypeptide of the present invention are administered in combination with an angiogenic protein, or polynucleotides encoding an angiogenic protein. Examples of angiogenic proteins that may be administered with the compositions of the invention include, but are not limited to, acidic and basic fibroblast growth factors, VEGF-1, VEGF-2, VEGF-3, epidermal growth factor alpha and beta, platelet-derived endothelial cell growth factor, platelet-derived growth factor, tumor necrosis factor alpha, hepatocyte growth factor, insulin-like growth factor, colony stimulating factor, macrophage colony stimulating factor, granulocyte/macrophage colony stimulating factor, and nitric oxide synthase.

[1000] In additional embodiments, compositions of the invention are administered in combination with a chemotherapeutic agent. Chemotherapeutic agents that may be administered with the Therapeutics of the invention include, but are not limited to alkylating agents such as nitrogen mustards (for example, Mechlorethamine, cyclophosphamide, Cyclophosphamide Ifosfamide, Melphalan (L-sarcolysin), and Chlorambucil), ethylenimines and methylmelamines (for example, Hexamethylmelamine and Thiotepa), alkyl sulfonates (for example, Busulfan), nitrosoureas (for example, Carmustine (BCNU), Lomustine (CCNU), Semustine (methyl-CCNU), and Streptozocin (streptozotocin)), triazenes (for example, Dacarbazine (DTIC; dimethyltriazenoimidazolecarboxamide)), folic acid analogs (for example, Methotrexate (amethopterin)), pyrimidine analogs (for example, Fluorouacil (5-fluorouracil; 5-FU), Floxuridine (fluorodeoxyunridine; FudR), and Cytarabine (cytosine arabinoside)), purine analogs and related inhibitors (for example, Mercaptopurine (6-mercaptopurine; 6-MP), Thioguanine (6-thioguanine; TG), and Pentostatin (2′-deoxycoformycin)), vinca alkaloids (for example, Vinblastine (VLB, vinblastine sulfate)) and Vincristine (vincristine sulfate)), epipodophyllotoxins (for example, Etoposide and Teniposide), antibiotics (for example, Dactinomycin (actinomycin D), Daunorubicin (daunomycin; rubidomycin), Doxorubicin, Bleomycin, Plicamycin (mithramycin), and Mitomycin (mitomycin C), enzymes (for example, L-Asparaginase), biological response modifiers (for example, Interferon-alpha and interferon-alpha-2b), platinum coordination compounds (for example, Cisplatin (cis-DDP) and Carboplatin), anthracenedione (Mitoxantrone), substituted ureas (for example, Hydroxyurea), methylhydrazine derivatives (for example, Procarbazine (N-methylhydrazine; MIH), adrenocorticosteroids (for example, Prednisone), progestins (for example, Hydroxyprogesterone caproate, Medroxyprogesterone, Medroxyprogesterone acetate, and Megestrol acetate), estrogens (for example, Diethylstilbestrol (DES), Diethylstilbestrol diphosphate, Estradiol, and Ethinyl estradiol), antiestrogens (for example, Tamoxifen), androgens (Testosterone proprionate, and Fluoxymesterone), antiandrogens (for example, Flutamide), gonadotropin-releasing horomone analogs (for example, Leuprolide), other hormones and hormone analogs (for example, methyltestosterone, estramustine, estramustine phosphate sodium, chlorotrianisene, and testolactone), and others (for example, dicarbazine, glutamic acid, and mitotane).

[1001] In one embodiment, the compositions of the invention are administered in combination with one or more of the following drugs: infliximab (also known as Remicade™ Centocor, Inc.), Trocade (Roche, RO-32-3555), Leflunomide (also known as Arava™ from Hoechst Marion Roussel), Kineret™ (an IL-1 Receptor antagonist also known as Anakinra from Amgen, Inc.)

[1002] In a specific embodiment, compositions of the invention are administered in combination with CHOP (cyclophosphamide, doxorubicin, vincristine, and prednisone) or combination of one or more of the components of CHOP. In one embodiment, the compositions of the invention are administered in combination with anti-CD20 antibodies, human monoclonal anti-CD20 antibodies. In another embodiment, the compositions of the invention are administered in combination with anti-CD20 antibodies and CHOP, or anti-CD20 antibodies and any combination of one or more of the components of CHOP, particularly cyclophosphamide and/or prednisone. In a specific embodiment, compositions of the invention are administered in combination with Rituximab. In a further embodiment, compositions of the invention are administered with Rituximab and CHOP, or Rituximab and any combination of one or more of the components of CHOP, particularly cyclophosphamide and/or prednisone. In a specific embodiment, compositions of the invention are administered in combination with tositumomab. In a further embodiment, compositions of the invention are administered with tositumomab and CHOP, or tositumomab and any combination of one or more of the components of CHOP, particularly cyclophosphamide and/or prednisone. The anti-CD20 antibodies may optionally be associated with radioisotopes, toxins or cytotoxic prodrugs.

[1003] In another specific embodiment, the compositions of the invention are administered in combination Zevalin™. In a further embodiment, compositions of the invention are administered with Zevalin™ and CHOP, or Zevalin™ and any combination of one or more of the components of CHOP, particularly cyclophosphamide and/or prednisone. Zevalin™ may be associated with one or more radisotopes. Particularly preferred isotopes are ⁹⁰Y and ¹¹¹In.

[1004] In an additional embodiment, the Therapeutics of the invention are administered in combination with cytokines. Cytokines that may be administered with the Therapeutics of the invention include, but are not limited to, IL2, IL3, IL4, IL5, IL6, IL7, IL10, IL12, IL13, IL15, anti-CD40, CD40L, IFN-gamma and TNF-alpha. In another embodiment, Therapeutics of the invention may be administered with any interleukin, including, but not limited to, IL-1alpha, IL-1beta, IL-2, IL-3, IL-4, IL-5, IL-6, IL-7, IL-8, IL-9, IL-10, IL-11, IL-12, IL-13, IL-14, IL-15, IL-16, IL-17, IL-18, IL-19, IL-20, and IL-21.

[1005] In one embodiment, the Therapeutics of the invention are administered in combination with members of the TNF family. TNF, TNF-related or TNF-like molecules that may be administered with the Therapeutics of the invention include, but are not limited to, soluble forms of TNF-alpha, lymphotoxin-alpha (LT-alpha, also known as TNF-beta), LT-beta (found in complex heterotrimer LT-alpha2-beta), OPGL, FasL, CD27L, CD30L, CD40L, 4-1BBL, DcR3, OX40L, TNF-gamma (International Publication No. WO 96/14328), AIM-I (International Publication No. WO 97/33899), endokine-alpha (International Publication No. WO 98/07880), OPG, and neutrokine-alpha (International Publication No. WO 98/18921, OX40, and nerve growth factor (NGF), and soluble forms of Fas, CD30, CD27, CD40 and 4-IBB, TR2 (International Publication No. WO 96/34095), DR3 (International Publication No. WO 97/33904), DR4 (International Publication No. WO 98/32856), TR5 (International Publication No. WO 98/30693), TRANK, TR9 (International Publication No. WO 98/56892), TR10 (International Publication No. WO 98/54202), 312C2 (International Publication No. WO 98/06842), and TR12, and soluble forms CD154, CD70, and CD153.

[1006] In an additional embodiment, the Therapeutics of the invention are administered in combination with angiogenic proteins. Angiogenic proteins that may be administered with the Therapeutics of the invention include, but are not limited to, Glioma Derived Growth Factor (GDGF), as disclosed in European Patent Number EP-399816; Platelet Derived Growth Factor-A (PDGF-A), as disclosed in European Patent Number EP-682110; Platelet Derived Growth Factor-B (PDGF-B), as disclosed in European Patent Number EP-282317; Placental Growth Factor (PlGF), as disclosed in International Publication Number WO 92/06194; Placental Growth Factor-2 (PlGF-2), as disclosed in Hauser et al., Growth Factors, 4:259-268 (1993); Vascular Endothelial Growth Factor (VEGF), as disclosed in International Publication Number WO 90/13649; Vascular Endothelial Growth Factor-A (VEGF-A), as disclosed in European Patent Number EP-506477; Vascular Endothelial Growth Factor-2 (VEGF-2), as disclosed in International Publication Number WO 96/39515; Vascular Endothelial Growth Factor B (VEGF-3); Vascular Endothelial Growth Factor B-186 (VEGF-B186), as disclosed in International Publication Number WO 96/26736; Vascular Endothelial Growth Factor-D (VEGF-D), as disclosed in International Publication Number WO 98/02543; Vascular Endothelial Growth Factor-D (VEGF-D), as disclosed in International Publication Number WO 98/07832; and Vascular Endothelial Growth Factor-E (VEGF-E), as disclosed in German Patent Number DE19639601. The above mentioned references are herein incorporated by reference in their entireties.

[1007] In an additional embodiment, the Therapeutics of the invention are administered in combination with Fibroblast Growth Factors. Fibroblast Growth Factors that may be administered with the Therapeutics of the invention include, but are not limited to, FGF-1, FGF-2, FGF-3, FGF-4, FGF-5, FGF-6, FGF-7, FGF-8, FGF-9, FGF-10, FGF-11, FGF-12, FGF-13, FGF-14, and FGF-15.

[1008] In an additional embodiment, the Therapeutics of the invention are administered in combination with hematopoietic growth factors. Hematopoietic growth factors that may be administered with the Therapeutics of the invention include, but are not limited to, granulocyte macrophage colony stimulating factor (GM-CSF) (sargramostim, LEUKINE™, PROKINE™), granulocyte colony stimulating factor (G-CSF) (filgrastim, NEUPOGEN™), macrophage colony stimulating factor (M-CSF, CSF-1) erythropoietin (epoetin alfa, EPOGEN™, PROCRIT™), stem cell factor (SCF, c-kit ligand, steel factor), megakaryocyte colony stimulating factor, PIXY321 (a GMCSF/IL-3 fusion protein), interleukins, especially any one or more of IL-1 through IL-12, interferon-gamma, or thrombopoietin.

[1009] In certain embodiments, Therapeutics of the present invention are administered in combination with adrenergic blockers, such as, for example, acebutolol, atenolol, betaxolol, bisoprolol, carteolol, labetalol, metoprolol, nadolol, oxprenolol, penbutolol, pindolol, propranolol, sotalol, and timolol.

[1010] In another embodiment, the Therapeutics of the invention are administered in combination with an antiarrhythmic drug (e.g., adenosine, amidoarone, bretylium, digitalis, digoxin, digitoxin, diliazem, disopyramide, esmolol, flecainide, lidocaine, mexiletine, moricizine, phenytoin, procainamide, N-acetyl procainamide, propafenone, propranolol, quini dine, sotalol, tocainide, and verapamil).

[1011] In another embodiment, the Therapeutics of the invention are administered in combination with diuretic agents, such as carbonic anhydrase-inhibiting agents (e.g., acetazolamide, dichlorphenamide, and methazolamide), osmotic diuretics (e.g., glycerin, isosorbide, mannitol, and urea), diuretics that inhibit Na⁺-K⁺-2Cl⁻ symport (e.g., furosemide, bumetamide, azosemide, piretamide, tripamide, ethacrynic acid, muzolimine, and torsemide), thiazide and thiazide-like diuretics (e.g., bendroflumethiazide, benzthiazide, chlorothiazide, hydrochlorothiazide, hydroflumethiazide, methyclothiazide, polythiazide, trichormethiazide, chlorthalidone, indapamide, metolazone, and quinethazone), potassium sparing diuretics (e.g., amiloride and triamterene), and mineralcorticoid receptor antagonists (e.g., spironolactone, canrenone, and potassium canrenoate).

[1012] In one embodiment, the Therapeutics of the invention are administered in combination with treatments for endocrine and/or hormone imbalance disorders. Treatments for endocrine and/or hormone imbalance disorders include, but are not limited to, ¹²⁷I, radioactive isotopes of iodine such as ¹³¹I and ¹²³I; recombinant growth hormone, such as HUMATROPE™ (recombinant somatropin); growth hormone analogs such as PROTROPIN™ (somatrem); dopamine agonists such as PARLODEL™ (bromocriptine); somatostatin analogs such as SANDOSTATIN™ (octreotide); gonadotropin preparations such as PREGNYL™, A.P.L. ™ and PROFASI™ (chorionic gonadotropin (CG)), PERGONAL™ (menotropins), and METRODIN™ (urofollitropin (uFSH)); synthetic human gonadotropin releasing hormone preparations such as FACTREL™ and LUTREPULSE™ (gonadorelin hydrochloride); synthetic gonadotropin agonists such as LUPRON™ (leuprolide acetate), SUPPRELIN™ (histrelin acetate), SYNAREL™ (nafarelin acetate), and ZOLADEX™ (goserelin acetate); synthetic preparations of thyrotropin-releasing hormone such as RELEFACT TRH™ and THYPINONE™ (protirelin); recombinant human TSH such as THYROGEN™; synthetic preparations of the sodium salts of the natural isomers of thyroid hormones such as L-T₄™, SYNTHROID™ and LEVOTHROID™ (levothyroxine sodium), L-T₃™, CYTOMEL™ and TRIOSTAT™ (liothyroine sodium), and THYROLAR™ (liotrix); antithyroid compounds such as 6-n-propylthiouracil (propylthiouracil), 1-methyl-2-mercaptoimidazole and TAPAZOLE™ (methimazole), NEO-MERCAZOLE™ (carbimazole); beta-adrenergic receptor antagonists such as propranolol and esmolol; Ca²⁺ channel blockers; dexamethasone and iodinated radiological contrast agents such as TELEPAQUE™ (iopanoic acid) and ORAGRAFIN™ (sodium ipodate).

[1013] Additional treatments for endocrine and/or hormone imbalance disorders include, but are not limited to, estrogens or congugated estrogens such as ESTRACE™ (estradiol), ESTINYL™ (ethinyl estradiol), PREMARIN™, ESTRATAB™, ORTHO-EST™, OGEN™ and estropipate (estrone), ESTROVIS™ (quinestrol), ESTRADERM™ (estradiol), DELESTROGEN™ and VALERGEN™ (estradiol valerate), DEPO-ESTRADIOL CYPIONATE™ and ESTROJECT LA™ (estradiol cypionate); antiestrogens such as NOLVADEX™ (tamoxifen), SEROPHENE™ and CLOMID™ (clomiphene); progestins such as DURALUTIN™ (hydroxyprogesterone caproate), MPA™ and DEPO-PROVERA™ (medroxyprogesterone acetate), PROVERAT™ and CYCRIN™ (MPA), MEGACE™ (megestrol acetate), NORLUTIN™ (norethindrone), and NORLUTATE™ and AYGESTIN™ (norethindrone acetate); progesterone implants such as NORPLANT SYSTEM™ (subdermal implants of norgestrel); antiprogestins such as RU 486™ (mifepristone); hormonal contraceptives such as ENOVID™ (norethynodrel plus mestranol), PROGESTASERT™ (intrauterine device that releases progesterone), LOESTRIN™, BREVICON™, MODICON™, GENORA™, NELONA™, NORINYL™, OVACON-35 ™ and OVACON-50™ (ethinyl estradiol/norethindrone), LEVLEN™, NORDETTE™, TR1-LEVLEN™ and TRIPHASIL-21™ (ethinyl estradiol/levonorgestrel) LO/OVRAL™ and OVRAL™ (ethinyl estradiol/norgestrel), DEMULEN™ (ethinyl estradiol/ethynodiol diacetate), NORINYL™, ORTHO-NOVUM™, NORETHIN™, GENORA™, and NELOVA™ (norethindrone/mestranol), DESOGEN™ and ORTHO-CEPT™ (ethinyl estradiol/desogestrel), ORTHO-CYCLEN™ and ORTHO-TRICYCLEN™ (ethinyl estradiol/norgestimate), MICRONOR™ and NOR-QD™ (norethindrone), and OVRETTE™ (norgestrel).

[1014] Additional treatments for endocrine and/or hormone imbalance disorders include, but are not limited to, testosterone esters such as methenolone acetate and testosterone undecanoate; parenteral and oral androgens such as TESTOJECT-50™ (testosterone), TESTEX™ (testosterone propionate), DELATESTRYL™ (testosterone enanthate), DEPO-TESTOSTERONE™ (testosterone cypionate), DANOCRINE™ (danazol), HALOTESTIN™ (fluoxymesterone), ORETON METHYL™, TESTRED™ and VIRILON™ (methyltestosterone), and OXANDRIN™ (oxandrolone); testosterone transdermal systems such as TESTODERM™; androgen receptor antagonist and 5-alpha-reductase inhibitors such as ANDROCUR™ (cyproterone acetate), EULEXIN™ (flutamide), and PROSCAR™ (finasteride); adrenocorticotropic hormone preparations such as CORTROSYN™ (cosyntropin); adrenocortical steroids and their synthetic analogs such as ACLOVATE™ (alclometasone dipropionate), CYCLOCORT™ (amcinonide), BECLOVENT™ and VANCERIL™ (beclomethasone dipropionate), CELESTONE™ (betamethasone), BENISONE™ and UTICORT™ (betamethasone benzoate), DIPROSONE™ (betamethasone dipropionate), CELESTONE PHOSPHATE™ (betamethasone sodium phosphate), CELESTONE SOLUSPAN™ (betamethasone sodium phosphate and acetate), BETA-VAL™ and VALISONE™ (betamethasone valerate), TEMOVATE™ (clobetasol propionate), CLODERM™ (clocortolone pivalate), CORTEF™ and HYDROCORTONE™ (cortisol (hydrocortisone)), HYDROCORTONE ACETATE™ (cortisol (hydrocortisone) acetate), LOCOID™ (cortisol (hydrocortisone) butyrate), HYDROCORTONE PHOSPHATE™ (cortisol (hydrocortisone) sodium phosphate), A-HYDROCORT™ and SOLU CORTEF™ (cortisol (hydrocortisone) sodium succinate), WESTCORT™ (cortisol (hydrocortisone) valerate), CORTISONE ACETATET™ (cortisone acetate), DESOWEN™ and TRIDESILON™ (desonide), TOPICORT™ (desoximetasone), DECADRON™ (dexamethasone), DECADRON LA™ (dexamethasone acetate), DECADRON PHOSPHATE™ and HEXADROL PHOSPHATE™ (dexamethasone sodium phosphate), FLORONE™ and MAXIFLOR™ (diflorasone diacetate), FLORINEF ACETATE™ (fludrocortisone acetate), AEROBID™ and NASALIDE™ (flunisolide), FLUONID™ and SYNALAR™ (fluocinolone acetonide), LIDEX™ (fluocinonide), FLUOR-OP™ and FML™ (fluorometholone), CORDRAN™ (flurandrenolide), HALOG™ (halcinonide), HMS LIZUIFILM™ (medrysone), MEDROL™ (methylprednisolone), DEPO-MEDROL™ and MEDROL ACETATE™ (methylprednisone acetate), A-METHAPRED™ and SOLUMEDROL™ (methylprednisolone sodium succinate), ELOCON™ (mometasone furoate), HALDRONE™ (paramethasone acetate), DELTA-CORTEF™ (prednisolone), ECONOPRED™ (prednisolone acetate), HYDELTRASOL™ (prednisolone sodium phosphate), HYDELTRA-T.B.A™ (prednisolone tebutate), DELTASONE™ (prednisone), ARISTOCORT™ and KENACORT™ (triamcinolone), KENALOG™ (triamcinolone acetonide), ARISTOCORT™ and KENACORT DIACETATE™ (triamcinolone diacetate), and ARISTOSPAN™ (triamcinolone hexacetonide); inhibitors of biosynthesis and action of adrenocortical steroids such as CYTADREN™ (aminoglutethimide), NIZORAL™ (ketoconazole), MODRASTANE™ (trilostane), and METOPIRONE™ (metyrapone); bovine, porcine or human insulin or mixtures thereof; insulin analogs; recombinant human insulin such as HUMULIN™ and NOVOLIN™; oral hypoglycemic agents such as ORAMIDE™ and ORINASE™ (tolbutamide), DIABINESE™ (chlorpropamide), TOLAMIDE™ and TOLINASE™ (tolazamide), DYMELOR™ (acetohexamide), glibenclamide, MICRONASE™, DIBETA™ and GLYNASE™ (glyburide), GLUCOTROL™ (glipizide), and DIAMICRON™ (gliclazide), GLUCOPHAGE™ (metformin), ciglitazone, pioglitazone, and alpha-glucosidase inhibitors; bovine or porcine glucagon; somatostatins such as SANDOSTATIN™ (octreotide); and diazoxides such as PROGLYCEM™ (diazoxide).

[1015] In one embodiment, the Therapeutics of the invention are administered in combination with treatments for uterine motility disorders. Treatments for uterine motility disorders include, but are not limited to, estrogen drugs such as conjugated estrogens (e.g., PREMARIN® and ESTRATAB®), estradiols (e.g., CLIMARA® and ALORA®), estropipate, and chlorotrianisene; progestin drugs (e.g., AMEN® (medroxyprogesterone), MICRONOR® (norethidrone acetate), PROMETRIUM® progesterone, and megestrol acetate); and estrogen/progesterone combination therapies such as, for example, conjugated estrogenslmedroxyprogesterone (e.g., PREMPRO™ and PREMPHASE®) and norethindrone acetate/ethinyl estsradiol (e.g., FEMHRT™).

[1016] In an additional embodiment, the Therapeutics of the invention are administered in combination with drugs effective in treating iron deficiency and hypochromic anemias, including but not limited to, ferrous sulfate (iron sulfate, FEOSOL™), ferrous fumarate (e.g., FEOSTAT™), ferrous gluconate (e.g., FERGON™), polysaccharide-iron complex (e.g., NIFEREX™), iron dextran injection (e.g., INFED™), cupric sulfate, pyroxidine, riboflavin, Vitamin B₁₂, cyancobalamin injection (e.g., REDISOL™, RTUBRAMIN PC™), hydroxocobalamin, folic acid (e.g., FOLVITE™), leucovorin (folinic acid, 5-CHOH4PteGlu, citrovorum factor) or WELLCOVORIN (Calcium salt of leucovorin), transferrin or ferritin.

[1017] In certain embodiments, the Therapeutics of the invention are administered in combination with agents used to treat psychiatric disorders. Psychiatric drugs that may be administered with the Therapeutics of the invention include, but are not limited to, antipsychotic agents (e.g., chlorpromazine, chlorprothixene, clozapine, fluphenazine, haloperidol, loxapine, mesoridazine, molindone, olanzapine, perphenazine, pimozide, quetiapine, risperidone, thioridazine, thiothixene, trifluoperazine, and triflupromazine), antimanic agents (e.g., carbamazepine, divalproex sodium, lithium carbonate, and lithium citrate), antidepressants (e.g., amitriptyline, amoxapine, bupropion, citalopram, clomipramine, desipramine, doxepin, fluvoxamine, fluoxetine, imipramine, isocarboxazid, maprotiline, mirtazapine, nefazodone, nortriptyline, paroxetine, phenelzine, protriptyline, sertraline, tranylcypromine, trazodone, trimipramine, and venlafaxine), antianxiety agents (e.g., alprazolam, buspirone, chlordiazepoxide, clorazepate, diazepam, halazepam, lorazepam, oxazepam, and prazepam), and stimulants (e.g., d-amphetamine, methylphenidate, and pemoline).

[1018] In other embodiments, the Therapeutics of the invention are administered in combination with agents used to treat neurological disorders. Neurological agents that may be administered with the Therapeutics of the invention include, but are not limited to, antiepileptic agents (e.g., carbamazepine, clonazepam, ethosuximide, phenobarbital, phenytoin, primidone, valproic acid, divalproex sodium, felbamate, gabapentin, lamotrigine, levetiracetam, oxcarbazepine, tiagabine, topiramate, zonisamide, diazepam, lorazepam, and clonazepam), antiparkinsonian agents (e.g., levodopa/carbidopa, selegiline, amantidine, bromocriptine, pergolide, ropinirole, pramipexole, benztropine; biperiden; ethopropazine; procyclidine; trihexyphenidyl, tolcapone), and ALS therapeutics (e.g. riluzole).

[1019] In another embodiment, Therapeutics of the invention are administered in combination with vasodilating agents and/or calcium channel blocking agents. Vasodilating agents that may be administered with the Therapeutics of the invention include, but are not limited to, Angiotensin Converting Enzyme (ACE) inhibitors (e.g., papaverine, isoxsuprine, benazepril, captopril, cilazapril, enalapril, enalaprilat, fosinopril, lisinopril, moexipril, perindopril, quinapril, ramipril, spirapril, trandolapril, and nylidrin), and nitrates (e.g., isosorbide dinitrate, isosorbide mononitrate, and nitroglycerin). Examples of calcium channel blocking agents that may be administered in combination with the Therapeutics of the invention include, but are not limited to amlodipine, bepridil, diltiazem, felodipine, flunarizine, isradipine, nicardipine, nifedipine, nimodipine, and verapamil.

[1020] In certain embodiments, the Therapeutics of the invention are administered in combination with treatments for gastrointestinal disorders. Treatments for gastrointestinal disorders that may be administered with the Therapeutic of the invention include, but are not limited to, H₂ histamine receptor antagonists (e.g., TAGAMET™ (cimetidine), ZANTAC™ (ranitidine), PEPCID™ (famotidine), and AXID™ (nizatidine)); inhibitors of H⁺, K⁺ ATPase (e.g., PREVACID™ (lansoprazole) and PRILOSEC™ (omeprazole)); Bismuth compounds (e.g., PEPTO-BISMOL™ (bismuth subsalicylate) and DE-NOL™ (bismuth subeitrate)); various antacids; sucralfate; prostaglandin analogs (e.g. CYTOTEC™ (misoprostol)); muscarinic cholinergic antagonists; laxatives (e.g., surfactant laxatives, stimulant laxatives, saline and osmotic laxatives); antidiarrheal agents (e.g., LOMOTIL™ (diphenoxylate), MOTOFEN™ (diphenoxin), and IMODIUM™ (loperamide hydrochloride)), synthetic analogs of somatostatin such as SANDOSTATIN™ (octreotide), antiemetic agents (e.g., ZOFRAN™ (ondansetron), KYTRIL™ (granisetron hydrochloride), tropisetron, dolasetron, metoclopramide, chlorpromazine, perphenazine, prochlorperazine, promethazine, thiethylperazine, triflupromazine, domperidone, haloperidol, droperidol, trimethobenzamide, dexamethasone, methylprednisolone, dronabinol, and nabilone); D2 antagonists (e.g., metoclopramide, trimethobenzamide and chlorpromazine); bile salts; chenodeoxycholic acid; ursodeoxycholic acid; and pancreatic enzyme preparations such as pancreatin and pancrelipase.

[1021] In additional embodiments, the Therapeutics of the invention are administered in combination with other therapeutic or prophylactic regimens, such as, for example, radiation therapy.

### Example 14

### Method of Treating Decreased Levels of the Polypeptide

[1022] The present invention relates to a method for treating an individual in need of an increased level of a polypeptide of the invention in the body comprising administering to such an individual a composition comprising a therapeutically effective amount of an agonist of the invention (including polypeptides of the invention). Moreover, it will be appreciated that conditions caused by a decrease in the standard or normal expression level of a polypeptide of the present invention in an individual can be treated by administering the agonist or antagonist of the present invention. Thus, the invention also provides a method of treatment of an individual in need of an increased level of the polypeptide comprising administering to such an individual a Therapeutic comprising an amount of the agonist or antagonist to increase the activity level of the polypeptide in such an individual.

[1023] For example, a patient with decreased levels of a polypeptide receives a daily dose 0.1-100 ug/kg of the agonist or antagonist for six consecutive days. The exact details of the dosing scheme, based on administration and formulation, are provided in Example 13.

### Example 15

### Method of Treating Increased Levels of the Polypeptide

[1024] The present invention also relates to a method of treating an individual in need of a decreased level of a polypeptide of the invention in the body comprising administering to such an individual a composition comprising a therapeutically effective amount of an antagonist of the invention (including polypeptides and antibodies of the invention).

[1025] In one example, antisense technology is used to inhibit production of a polypeptide of the present invention. This technology is one example of a method of decreasing levels of a polypeptide, due to a variety of etiologies, such as cancer.

[1026] For example, a patient diagnosed with abnormally increased levels of a polypeptide is administered intravenously antisense polynucleotides at 0.5, 1.0, 1.5, 2.0 and 3.0 mg/kg day for 21 days. This treatment is repeated after a 7-day rest period if the treatment was well tolerated. The antisense polynucleotides of the present invention can be formulated using techniques and formulations described herein (e.g. see Example 13), or otherwise known in the art.

### Example 16

### Method of Treatment Using Gene Therapy—Ex Vivo

[1027] One method of gene therapy transplants fibroblasts, which are capable of expressing a polypeptide, onto a patient. Generally, fibroblasts are obtained from a subject by skin biopsy. The resulting tissue is placed in tissue-culture medium and separated into small pieces. Small chunks of the tissue are placed on a wet surface of a tissue culture flask, approximately ten pieces are placed in each flask. The flask is turned upside down, closed tight and left at room temperature over night. After 24 hours at room temperature, the flask is inverted and the chunks of tissue remain fixed to the bottom of the flask and fresh media (e.g., Ham's F12 media, with 10% FBS, penicillin and streptomycin) is added. The flasks are then incubated at 37 degree C. for approximately one week.

[1028] At this time, fresh media is added and subsequently changed every several days. After an additional two weeks in culture, a monolayer of fibroblasts emerge. The monolayer is trypsinized and scaled into larger flasks.

[1029] pMV-7 (Kirschmeier, P. T. et al., DNA, 7:219-25 (1988)), flanked by the long terminal repeats of the Moloney murine sarcoma virus, is digested with EcoRI and HindIII and subsequently treated with calf intestinal phosphatase. The linear vector is fractionated on agarose gel and purified, using glass beads.

[1030] The cDNA encoding a polypeptide of the present invention can be amplified using PCR primers which correspond to the 5′ and 3′ end sequences respectively as set forth in Example 1 using primers and having appropriate restriction sites and initiation/stop codons, if necessary. Preferably, the 5′ primer contains an EcoRI site and the 3′ primer includes a HindIII site. Equal quantities of the Moloney murine sarcoma virus linear backbone and the amplified EcoRI and HindIII fragment are added together, in the presence of T4 DNA ligase. The resulting mixture is maintained under conditions appropriate for ligation of the two fragments. The ligation mixture is then used to transform bacteria HB101, which are then plated onto agar containing kanamycin for the purpose of confirming that the vector has the gene of interest properly inserted.

[1031] The amphotropic pA317 or GP+am12 packaging cells are grown in tissue culture to confluent density in Dulbecco's Modified Eagles Medium (DMEM) with 10% calf serum (CS), penicillin and streptomycin. The MSV vector containing the gene is then added to the media and the packaging cells transduced with the vector. The packaging cells now produce infectious viral particles containing the gene (the packaging cells are now referred to as producer cells).

[1032] Fresh media is added to the transduced producer cells, and subsequently, the media is harvested from a 10 cm plate of confluent producer cells. The spent media, containing the infectious viral particles, is filtered through a millipore filter to remove detached producer cells and this media is then used to infect fibroblast cells. Media is removed from a sub-confluent plate of fibroblasts and quickly replaced with the media from the producer cells. This media is removed and replaced with fresh media. If the titer of virus is high, then virtually all fibroblasts will be infected and no selection is required. If the titer is very low, then it is necessary to use a retroviral vector that has a selectable marker, such as neo or his. Once the fibroblasts have been efficiently infected, the fibroblasts are analyzed to determine whether protein is produced.

[1033] The engineered fibroblasts are then transplanted onto the host, either alone or after having been grown to confluence on cytodex 3 microcarrier beads.

### Example 17

### Gene Therapy Using Endogenous Genes Corresponding to Polynucleotides of the Invention

[1034] Another method of gene therapy according to the present invention involves operably associating the endogenous polynucleotide sequence of the invention with a promoter via homologous recombination as described, for example, in U.S. Pat. No. 5,641,670, issued Jun. 24, 1997; International Publication NO: WO 96/29411, published Sep. 26, 1996; International Publication NO: WO 94/12650, published Aug. 4, 1994; Koller et al., Proc. Natl. Acad. Sci. USA, 86:8932-8935 (1989); and Zijlstra et al., Nature, 342:435-438 (1989). This method involves the activation of a gene which is present in the target cells, but which is not expressed in the cells, or is expressed at a lower level than desired.

[1035] Polynucleotide constructs are made which contain a promoter and targeting sequences, which are homologous to the 5′ non-coding sequence of endogenous polynucleotide sequence, flanking the promoter. The targeting sequence will be sufficiently near the 5′ end of the polynucleotide sequence so the promoter will be operably linked to the endogenous sequence upon homologous recombination. The promoter and the targeting sequences can be amplified using PCR. Preferably, the amplified promoter contains distinct restriction enzyme sites on the 5′ and 3′ ends. Preferably, the 3′ end of the first targeting sequence contains the same restriction enzyme site as the 5′ end of the amplified promoter and the 5′ end of the second targeting sequence contains the same restriction site as the 3′ end of the amplified promoter.

[1036] The amplified promoter and the amplified targeting sequences are digested with the appropriate restriction enzymes and subsequently treated with calf intestinal phosphatase. The digested promoter and digested targeting sequences are added together in the presence of T4 DNA ligase. The resulting mixture is maintained under conditions appropriate for ligation of the two fragments. The construct is size fractionated on an agarose gel, then purified by phenol extraction and ethanol precipitation.

[1037] In this Example, the polynucleotide constructs are administered as naked polynucleotides via electroporation. However, the polynucleotide constructs may also be administered with transfection-facilitating agents, such as liposomes, viral sequences, viral particles, precipitating agents, etc. Such methods of delivery are known in the art.

[1038] Once the cells are transfected, homologous recombination will take place which results in the promoter being operably linked to the endogenous polynucleotide sequence. This results in the expression of polynucleotide corresponding to the polynucleotide in the cell. Expression may be detected by immunological staining, or any other method known in the art.

[1039] Fibroblasts are obtained from a subject by skin biopsy. The resulting tissue is placed in DMEM+10% fetal calf serum. Exponentially growing or early stationary phase fibroblasts are trypsinized and rinsed from the plastic surface with nutrient medium. An aliquot of the cell suspension is removed for counting, and the remaining cells are subjected to centrifugation. The supernatant is aspirated and the pellet is resuspended in 5 ml of electroporation buffer (20 mM HEPES pH 7.3, 137 mM NaCl, 5 mM KCl, 0.7 mM Na₂ HPO₄, 6 mM dextrose). The cells are recentrifuged, the supernatant aspirated, and the cells resuspended in electroporation buffer containing 1 mg/ml acetylated bovine serum albumin. The final cell suspension contains approximately 3×10⁶ cells/ml. Electroporation should be performed immediately following resuspension.

[1040] Plasmid DNA is prepared according to standard techniques. For example, to construct a plasmid for targeting to the locus corresponding to the polynucleotide of the invention, plasmid pUC18 (MBI Fermentas, Amherst, N.Y.) is digested with HindIII. The CMV promoter is amplified by PCR with an XbaI site on the 5′ end and a BamHI site on the 3′ end. Two non-coding sequences are amplified via PCR: one non-coding sequence (fragment 1) is amplified with a HindIII site at the 5′ end and an Xba site at the 3′end; the other non-coding sequence (fragment 2) is amplified with a BamHI site at the 5′end and a HindIII site at the 3′end. The CMV promoter and the fragments (1 and 2) are digested with the appropriate enzymes (CMV promoter—XbaI and BamHI; fragment 1—XbaI; fragment 2—BamHI) and ligated together. The resulting ligation product is digested with HindIII, and ligated with the HindIII-digested pUC18 plasmid.

[1041] Plasmid DNA is added to a sterile cuvette with a 0.4 cm electrode gap (Bio-Rad). The final DNA concentration is generally at least 120 μg/ml. 0.5 ml of the cell suspension (containing approximately 1.5.×10⁶ cells) is then added to the cuvette, and the cell suspension and DNA solutions are gently mixed. Electroporation is performed with a Gene-Pulser apparatus (Bio-Rad). Capacitance and voltage are set at 960 μF and 250-300 V, respectively. As voltage increases, cell survival decreases, but the percentage of surviving cells that stably incorporate the introduced DNA into their genome increases dramatically. Given these parameters, a pulse time of approximately 14-20 mSec should be observed.

[1042] Electroporated cells are maintained at room temperature for approximately 5 min, and the contents of the cuvette are then gently removed with a sterile transfer pipette. The cells are added directly to 10 ml of prewarmed nutrient media (DMEM with 15% calf serum) in a 10 cm dish and incubated at 37 degree C. The following day, the media is aspirated and replaced with 10 ml of fresh media and incubated for a further 16-24 hours.

[1043] The engineered fibroblasts are then injected into the host, either alone or after having been grown to confluence on cytodex 3 microcarrier beads. The fibroblasts now produce the protein product. The fibroblasts can then be introduced into a patient as described above.

### Example 18

### Method of Treatment Using Gene Therapy—In Vivo

[1044] Another aspect of the present invention is using in vivo gene therapy methods to treat disorders, diseases and conditions. The gene therapy method relates to the introduction of naked nucleic acid (DNA, RNA, and antisense DNA or RNA) sequences into an animal to increase or decrease the expression of the polypeptide. The polynucleotide of the present invention may be operatively linked to (i.e., associated with) a promoter or any other genetic elements necessary for the expression of the polypeptide by the target tissue. Such gene therapy and delivery techniques and methods are known in the art, see, for example, WO90/11092, WO98/11779; U.S. Pat. No. 5,693,622, 5705151, 5580859; Tabata et al., Cardiovasc. Res. 35(3):470-479 (1997); Chao et al., Pharmacol. Res. 35(6):517-522 (1997); Wolff, Neuromuscul. Disord. 7(5):314-318 (1997); Schwartz et al., Gene Ther. 3(5):405-411 (1996); Tsurumi et al., Circulation 94(12):3281-3290 (1996) (incorporated herein by reference).

[1045] The polynucleotide constructs may be delivered by any method that delivers injectable materials to the cells of an animal, such as, injection into the interstitial space of tissues (heart, muscle, skin, lung, liver, intestine and the like). The polynucleotide constructs can be delivered in a pharmaceutically acceptable liquid or aqueous carrier.

[1046] The term “naked” polynucleotide, DNA or RNA, refers to sequences that are free from any delivery vehicle that acts to assist, promote, or facilitate entry into the cell, including viral sequences, viral particles, liposome formulations, lipofectin or precipitating agents and the like. However, the polynucleotides of the present invention may also be delivered in liposome formulations (such as those taught in Felgner P. L. et al. (1995) Ann. NY Acad. Sci. 772:126-139 and Abdallah B. et al. (1995) Biol. Cell 85(1):1-7) which can be prepared by methods well known to those skilled in the art.

[1047] The polynucleotide vector constructs used in the gene therapy method are preferably constructs that will not integrate into the host genome nor will they contain sequences that allow for replication. Any strong promoter known to those skilled in the art can be used for driving the expression of DNA. Unlike other gene therapy techniques, one major advantage of introducing naked nucleic acid sequences into target cells is the transitory nature of the polynucleotide synthesis in the cells. Studies have shown that non-replicating DNA sequences can be introduced into cells to provide production of the desired polypeptide for periods of up to six months.

[1048] The polynucleotide construct can be delivered to the interstitial space of tissues within an animal, including muscle, skin, brain, lung, liver, spleen, bone marrow, thymus, heart, lymph, blood, bone, cartilage, pancreas, kidney, gall bladder, stomach, intestine, testis, ovary, uterus, rectum, nervous system, eye, gland, and connective tissue. Interstitial space of the tissues comprises the intercellular fluid, mucopolysaccharide matrix among the reticular fibers of organ tissues, elastic fibers in the walls of vessels or chambers, collagen fibers of fibrous tissues, or that same matrix within connective tissue ensheathing muscle cells or in the lacunae of bone. It is similarly the space occupied by the plasma of the circulation and the lymph fluid of the lymphatic channels. Delivery to the interstitial space of muscle tissue is preferred for the reasons discussed below. They may be conveniently delivered by injection into the tissues comprising these cells. They are preferably delivered to and expressed in persistent, non-dividing cells which are differentiated, although delivery and expression may be achieved in non-differentiated or less completely differentiated cells, such as, for example, stem cells of blood or skin fibroblasts. In vivo muscle cells are particularly competent in their ability to take up and express polynucleotides.

[1049] For the naked polynucleotide injection, an effective dosage amount of DNA or RNA will be in the range of from about 0.05 g/kg body weight to about 50 mg/kg body weight. Preferably the dosage will be from about 0.005 mg/kg to about 20 mg/kg and more preferably from about 0.05 mg/kg to about 5 mg/kg. Of course, as the artisan of ordinary skill will appreciate, this dosage will vary according to the tissue site of injection. The appropriate and effective dosage of nucleic acid sequence can readily be determined by those of ordinary skill in the art and may depend on the condition being treated and the route of administration. The preferred route of administration is by the parenteral route of injection into the interstitial space of tissues. However, other parenteral routes may also be used, such as, inhalation of an aerosol formulation particularly for delivery to lungs or bronchial tissues, throat or mucous membranes of the nose. In addition, naked polynucleotide constructs can be delivered to arteries during angioplasty by the catheter used in the procedure.

[1050] The dose response effects of injected polynucleotide in muscle in vivo is determined as follows. Suitable template DNA for production of mRNA coding for polypeptide of the present invention is prepared in accordance with a standard recombinant DNA methodology. The template DNA, which may be either circular or linear, is either used as naked DNA or complexed with liposomes. The quadriceps muscles of mice are then injected with various amounts of the template DNA.

[1051] Five to six week old female and male Balb/C mice are anesthetized by intraperitoneal injection with 0.3 ml of 2.5% Avertin. A 1.5 cm incision is made on the anterior thigh, and the quadriceps muscle is directly visualized. The template DNA is injected in 0.1 ml of carrier in a 1 cc syringe through a 27 gauge needle over one minute, approximately 0.5 cm from the distal insertion site of the muscle into the knee and about 0.2 cm deep. A suture is placed over the injection site for future localization, and the skin is closed with stainless steel clips.

[1052] After an appropriate incubation time (e.g., 7 days) muscle extracts are prepared by excising the entire quadriceps. Every fifth 15 um cross-section of the individual quadriceps muscles is histochemically stained for protein expression. A time course for protein expression may be done in a similar fashion except that quadriceps from different mice are harvested at different times. Persistence of DNA in muscle following injection may be determined by Southern blot analysis after preparing total cellular DNA and HIRT supernatants from injected and control mice. The results of the above experimentation in mice can be used to extrapolate proper dosages and other treatment parameters in humans and other animals using naked DNA.

### Example 19

### Transgenic Animals

[1053] The polypeptides of the invention can also be expressed in transgenic animals. Animals of any species, including, but not limited to, mice, rats, rabbits, hamsters, guinea pigs, pigs, micro-pigs, goats, sheep, cows and non-human primates, e.g., baboons, monkeys, and chimpanzees may be used to generate transgenic animals. In a specific embodiment, techniques described herein or otherwise known in the art, are used to express polypeptides of the invention in humans, as part of a gene therapy protocol.

[1054] Any technique known in the art may be used to introduce the transgene (i.e., polynucleotides of the invention) into animals to produce the founder lines of transgenic animals. Such techniques include, but are not limited to, pronuclear microinjection (Paterson et al., Appl. Microbiol. Biotechnol. 40:691-698 (1994); Carver et al., Biotechnology (NY) 11:1263-1270 (1993); Wright et al., Biotechnology (NY) 9:830-834 (1991); and Hoppe et al., U.S. Pat. No. 4,873,191 (1989)); retrovirus mediated gene transfer into germ lines (Van der Putten et al., Proc. Natl. Acad. Sci., USA 82:6148-6152 (1985)), blastocysts or embryos; gene targeting in embryonic stem cells (Thompson et al., Cell 56:313-321 (1989)); electroporation of cells or embryos (Lo, 1983, Mol Cell. Biol. 3:1803-1814 (1983)); introduction of the polynucleotides of the invention using a gene gun (see, e.g., Ulmer et al., Science 259:1745 (1993); introducing nucleic acid constructs into embryonic pleuripotent stem cells and transferring the stem cells back into the blastocyst; and sperm-mediated gene transfer (Lavitrano et al., Cell 57:717-723 (1989); etc. For a review of such techniques, see Gordon, “Transgenic Animals,” Intl. Rev. Cytol. 115:171-229 (1989), which is incorporated by reference herein in its entirety.

[1055] Any technique known in the art may be used to produce transgenic clones containing polynucleotides of the invention, for example, nuclear transfer into enucleated oocytes of nuclei from cultured embryonic, fetal, or adult cells induced to quiescence (Campell et al., Nature 380:64-66 (1996); Wilmut et al., Nature 385:810-813 (1997)).

[1056] The present invention provides for transgenic animals that carry the transgene in all their cells, as well as animals which carry the transgene in some, but not all their cells, i.e., mosaic animals or chimeric. The transgene may be integrated as a single transgene or as multiple copies such as in concatamers, e.g., head-to-head tandems or head-to-tail tandems. The transgene may also be selectively introduced into and activated in a particular cell type by following, for example, the teaching of Lasko et al. (Lasko et al., Proc. Natl. Acad. Sci. USA 89:6232-6236 (1992)). The regulatory sequences required for such a cell-type specific activation will depend upon the particular cell type of interest, and will be apparent to those of skill in the art. When it is desired that the polynucleotide transgene be integrated into the chromosomal site of the endogenous gene, gene targeting is preferred. Briefly, when such a technique is to be utilized, vectors containing some nucleotide sequences homologous to the endogenous gene are designed for the purpose of integrating, via homologous recombination with chromosomal sequences, into and disrupting the function of the nucleotide sequence of the endogenous gene. The transgene may also be selectively introduced into a particular cell type, thus inactivating the endogenous gene in only that cell type, by following, for example, the teaching of Gu et al. (Gu et al., Science 265:103-106 (1994)). The regulatory sequences required for such a cell-type specific inactivation will depend upon the particular cell type of interest, and will be apparent to those of skill in the art.

[1057] Once transgenic animals have been generated, the expression of the recombinant gene may be assayed utilizing standard techniques. Initial screening may be accomplished by Southern blot analysis or PCR techniques to analyze animal tissues to verify that integration of the transgene has taken place. The level of mRNA expression of the transgene in the tissues of the transgenic animals may also be assessed using techniques which include, but are not limited to, Northern blot analysis of tissue samples obtained from the animal, in situ hybridization analysis, and reverse transcriptase-PCR (rt-PCR). Samples of transgenic gene-expressing tissue may also be evaluated immunocytochemically or immunohistochemically using antibodies specific for the transgene product.

[1058] Once the founder animals are produced, they may be bred, inbred, outbred, or crossbred to produce colonies of the particular animal. Examples of such breeding strategies include, but are not limited to: outbreeding of founder animals with more than one integration site in order to establish separate lines; inbreeding of separate lines in order to produce compound transgenics that express the transgene at higher levels because of the effects of additive expression of each transgene; crossing of heterozygous transgenic animals to produce animals homozygous for a given integration site in order to both augment expression and eliminate the need for screening of animals by DNA analysis; crossing of separate homozygous lines to produce compound heterozygous or homozygous lines; and breeding to place the transgene on a distinct background that is appropriate for an experimental model of interest.

[1059] Transgenic animals of the invention have uses which include, but are not limited to, animal model systems useful in elaborating the biological function of polypeptides of the present invention, studying conditions and/or disorders associated with aberrant expression, and in screening for compounds effective in ameliorating such conditions and/or disorders.

### Example 20

### Knock-Out Animals

[1060] Endogenous gene expression can also be reduced by inactivating or “knocking out” the gene and/or its promoter using targeted homologous recombination. (e.g., see Smithies et al., Nature 317:230-234 (1985); Thomas & Capecchi, Cell 51:503-512 (1987); Thompson et al., Cell 5:313-321 (1989); each of which is incorporated by reference herein in its entirety). For example, a mutant, non-functional polynucleotide of the invention (or a completely unrelated DNA sequence) flanked by DNA homologous to the endogenous polynucleotide sequence (either the coding regions or regulatory regions of the gene) can be used, with or without a selectable marker and/or a negative selectable marker, to transfect cells that express polypeptides of the invention in vivo. In another embodiment, techniques known in the art are used to generate knockouts in cells that contain, but do not express the gene of interest. Insertion of the DNA construct, via targeted homologous recombination, results in inactivation of the targeted gene. Such approaches are particularly suited in research and agricultural fields where modifications to embryonic stem cells can be used to generate animal offspring with an inactive targeted gene (e.g., see Thomas & Capecchi 1987 and Thompson 1989, supra). However this approach can be routinely adapted for use in humans provided the recombinant DNA constructs are directly administered or targeted to the required site in vivo using appropriate viral vectors that will be apparent to those of skill in the art.

[1061] In further embodiments of the invention, cells that are genetically engineered to express the polypeptides of the invention, or alternatively, that are genetically engineered not to express the polypeptides of the invention (e.g., knockouts) are administered to a patient in vivo. Such cells may be obtained from the patient (i.e., animal, including human) or an MHC compatible donor and can include, but are not limited to fibroblasts, bone marrow cells, blood cells (e.g., lymphocytes), adipocytes, muscle cells, endothelial cells etc. The cells are genetically engineered in vitro using recombinant DNA techniques to introduce the coding sequence of polypeptides of the invention into the cells, or alternatively, to disrupt the coding sequence and/or endogenous regulatory sequence associated with the polypeptides of the invention, e.g., by transduction (using viral vectors, and preferably vectors that integrate the transgene into the cell genome) or transfection procedures, including, but not limited to, the use of plasmids, cosmids, YACs, naked DNA, electroporation, liposomes, etc. The coding sequence of the polypeptides of the invention can be placed under the control of a strong constitutive or inducible promoter or promoter/enhancer to achieve expression, and preferably secretion, of the polypeptides of the invention. The engineered cells which express and preferably secrete the polypeptides of the invention can be introduced into the patient systemically, e.g., in the circulation, or intraperitoneally.

[1062] Alternatively, the cells can be incorporated into a matrix and implanted in the body, e.g., genetically engineered fibroblasts can be implanted as part of a skin graft; genetically engineered endothelial cells can be implanted as part of a lymphatic or vascular graft. (See, for example, Anderson et al. U.S. Pat. No. 5,399,349; and Mulligan & Wilson, U.S. Pat. No. 5,460,959 each of which is incorporated by reference herein in its entirety).

[1063] When the cells to be administered are non-autologous or non-MHC compatible cells, they can be administered using well known techniques which prevent the development of a host immune response against the introduced cells. For example, the cells may be introduced in an encapsulated form which, while allowing for an exchange of components with the immediate extracellular environment, does not allow the introduced cells to be recognized by the host immune system.

[1064] Transgenic and “knock-out” animals of the invention have uses which include, but are not limited to, animal model systems useful in elaborating the biological function of polypeptides of the present invention, studying conditions and/or disorders associated with aberrant expression, and in screening for compounds effective in ameliorating such conditions and/or disorders.

### Example 21

### Assays Detecting Stimulation or Inhibition of B cell Proliferation and Differentiation

[1065] Generation of functional humoral immune responses requires both soluble and cognate signaling between B-lineage cells and their microenvironment. Signals may impart a positive stimulus that allows a B-lineage cell to continue its programmed development, or a negative stimulus that instructs the cell to arrest its current developmental pathway. To date, numerous stimulatory and inhibitory signals have been found to influence B cell responsiveness including IL-2, IL-4, IL-5, IL-6, IL-7, IL10, IL-13, IL-14 and IL-15. Interestingly, these signals are by themselves weak effectors but can, in combination with various co-stimulatory proteins, induce activation, proliferation, differentiation, homing, tolerance and death among B cell populations.

[1066] One of the best studied classes of B-cell co-stimulatory proteins is the TNF-superfamily. Within this family CD40, CD27, and CD30 along with their respective ligands CD154, CD70, and CD153 have been found to regulate a variety of immune responses. Assays which allow for the detection and/or observation of the proliferation and differentiation of these B-cell populations and their precursors are valuable tools in determining the effects various proteins may have on these B-cell populations in terms of proliferation and differentiation. Listed below are two assays designed to allow for the detection of the differentiation, proliferation, or inhibition of B-cell populations and their precursors.

[1067] In Vitro Assay-Agonists or antagonists of the invention can be assessed for its ability to induce activation, proliferation, differentiation or inhibition and/or death in B-cell populations and their precursors. The activity of the agonists or antagonists of the invention on purified human tonsillar B cells, measured qualitatively over the dose range from 0.1 to 10,000 ng/mL, is assessed in a standard B-lymphocyte co-stimulation assay in which purified tonsillar B cells are cultured in the presence of either formalin-fixed Staphylococcus aureus Cowan I (SAC) or immobilized anti-human IgM antibody as the priming agent. Second signals such as IL-2 and IL-15 synergize with SAC and IgM crosslinking to elicit B cell proliferation as measured by tritiated-thymidine incorporation. Novel synergizing agents can be readily identified using this assay. The assay involves isolating human tonsillar B cells by magnetic bead (MACS) depletion of CD3-positive cells. The resulting cell population is greater than 95% B cells as assessed by expression of CD45R(B220).

[1068] Various dilutions of each sample are placed into individual wells of a 96-well plate to which are added 10⁵ B-cells suspended in culture medium (RPMI 1640 containing 10% FBS, 5×10⁻⁵M 2ME, 100U/ml penicillin, 10 ug/ml streptomycin, and 10⁻⁵ dilution of SAC) in a total volume of 150 ul. Proliferation or inhibition is quantitated by a 20 h pulse (1 uCi/well) with 3H-thymidine (6.7 Ci/mM) beginning 72 h post factor addition. The positive and negative controls are IL2 and medium respectively.

[1069] In vivo Assay—BALB/c mice are injected (i.p.) twice per day with buffer only, or 2 mg/Kg of agonists or antagonists of the invention, or truncated forms thereof. Mice receive this treatment for 4 consecutive days, at which time they are sacrificed and various tissues and serum collected for analyses. Comparison of H&E sections from normal spleens and spleens treated with agonists or antagonists of the invention identify the results of the activity of the agonists or antagonists on spleen cells, such as the diffusion of peri-arterial lymphatic sheaths, and/or significant increases in the nucleated cellularity of the red pulp regions, which may indicate the activation of the differentiation and proliferation of B-cell populations. Immunohistochemical studies using a B cell marker, anti-CD45R(B220), are used to determine whether any physiological changes to splenic cells, such as splenic disorganization, are due to increased B-cell representation within loosely defined B-cell zones that infiltrate established T-cell regions.

[1070] Flow cytometric analyses of the spleens from mice treated with agonist or antagonist is used to indicate whether the agonists or antagonists specifically increases the proportion of ThB+, CD45R(B220)dull B cells over that which is observed in control mice.

[1071] Likewise, a predicted consequence of increased mature B-cell representation in vivo is a relative increase in serum Ig titers. Accordingly, serum IgM and IgA levels are compared between buffer and agonists or antagonists-treated mice.

[1072] The studies described in this example tested activity of agonists or antagonists of the invention. However, one skilled in the art could easily modify the exemplified studies to test the activity of polynucleotides or polypeptides of the invention (e.g., gene therapy).

### Example 22

### T Cell Proliferation Assay

[1073] A CD3-induced proliferation assay is performed on PBMCs and is measured by the uptake of ³H-thymidine. The assay is performed as follows. Ninety-six well plates are coated with 100 μl/well of mAb to CD3 (HIT3a, Pharningen) or isotype-matched control mAb (B33.1) overnight at 4 degrees C. (1 μg/ml in 0.05M bicarbonate buffer, pH 9.5), then washed three times with PBS. PBMC are isolated by F/H gradient centrifugation from human peripheral blood and added to quadruplicate wells (5×10⁴/well) of mAb coated plates in RPMI containing 10% FCS and P/S in the presence of varying concentrations of agonists or antagonists of the invention (total volume 200 ul). Relevant protein buffer and medium alone are controls. After 48 hr. culture at 37 degrees C., plates are spun for 2 min. at 1000 rpm and 100 μl of supernatant is removed and stored −20 degrees C. for measurement of IL-2 (or other cytokines) if effect on proliferation is observed. Wells are supplemented with 100 ul of medium containing 0.5 uCi of ³H-thymidine and cultured at 37 degrees C. for 18-24 hr. Wells are harvested and incorporation of 3H-thymidine used as a measure of proliferation. Anti-CD3 alone is the positive control for proliferation. IL-2 (100 U/ml) is also used as a control which enhances proliferation. Control antibody which does not induce proliferation of T cells is used as the negative control for the effects of agonists or antagonists of the invention.

[1074] The studies described in this example tested activity of agonists or antagonists of the invention. However, one skilled in the art could easily modify the exemplified studies to test the activity of polynucleotides or polypeptides of the invention (e.g., gene therapy).

### Example 23

### Effect of Agonists or Antagonists of the Invention on the Expression of MHC Class II, Costimulatory and Adhesion Molecules and Cell Differentiation of Monocytes and Monocyte-Derived Human Dendritic Cells

[1075] Dendritic cells are generated by the expansion of proliferating precursors found in the peripheral blood; adherent PBMC or elutriated monocytic fractions are cultured for 7-10 days with GM-CSF (50 ng/ml) and IL-4 (20 ng/ml). These dendritic cells have the characteristic phenotype of immature cells (expression of CD1, CD80, CD86, CD40 and MHC class II antigens). Treatment with activating factors, such as TNF-α, causes a rapid change in surface phenotype (increased expression of MHC class I and II, costimulatory and adhesion molecules, downregulation of FCγ RII, upregulation of CD83). These changes correlate with increased antigen-presenting capacity and with functional maturation of the dendritic cells.

[1076] FACS analysis of surface antigens is performed as follows. Cells are treated 1-3 days with increasing concentrations of agonist or antagonist of the invention or LPS (positive control), washed with PBS containing 1% BSA and 0.02 mM sodium azide, and then incubated with 1:20 dilution of appropriate FITC- or PE-labeled monoclonal antibodies for 30 minutes at 4 degrees C. After an additional wash, the labeled cells are analyzed by flow cytometry on a FACScan (Becton Dickinson).

[1077] Effect on the production of cytokines. Cytokines generated by dendritic cells, in particular IL-12, are important in the initiation of T-cell dependent immune responses. IL-12 strongly influences the development of Th1 helper T-cell immune response, and induces cytotoxic T and NK cell function. An ELISA is used to measure the IL-12 release as follows. Dendritic cells (10⁶/ml) are treated with increasing concentrations of agonists or antagonists of the invention for 24 hours. LPS (100 ng/ml) is added to the cell culture as positive control. Supernatants from the cell cultures are then collected and analyzed for IL-12 content using commercial ELISA kit (e.g., R & D Systems (Minneapolis, Minn.)). The standard protocols provided with the kits are used.

[1078] Effect on the expression of MHC Class II, costimulatory and adhesion molecules. Three major families of cell surface antigens can be identified on monocytes: adhesion molecules, molecules involved in antigen presentation, and Fc receptor. Modulation of the expression of MHC class II antigens and other costimulatory molecules, such as B7 and ICAM-1, may result in changes in the antigen presenting capacity of monocytes and ability to induce T cell activation. Increased expression of Fc receptors may correlate with improved monocyte cytotoxic activity, cytokine release and phagocytosis.

[1079] FACS analysis is used to examine the surface antigens as follows. Monocytes are treated 1-5 days with increasing concentrations of agonists or antagonists of the invention or LPS (positive control), washed with PBS containing 1% BSA and 0.02 mM sodium azide, and then incubated with 1:20 dilution of appropriate FITC— or PE-labeled monoclonal antibodies for 30 minutes at 4 degrees C. After an additional wash, the labeled cells are analyzed by flow cytometry on a FACScan (Becton Dickinson).

[1080] Monocyte activation and/or increased survival. Assays for molecules that activate (or alternatively, inactivate) monocytes and/or increase monocyte survival (or alternatively, decrease monocyte survival) are known in the art and may routinely be applied to determine whether a molecule of the invention functions as an inhibitor or activator of monocytes. Agonists or antagonists of the invention can be screened using the three assays described below. For each of these assays, Peripheral blood mononuclear cells (PBMC) are purified from single donor leukopacks (American Red Cross, Baltimore, Md.) by centrifugation through a Histopaque gradient (Sigma). Monocytes are isolated from PBMC by counterflow centrifugal elutriation.

[1081] Monocyte Survival Assay. Human peripheral blood monocytes progressively lose viability when cultured in absence of serum or other stimuli. Their death results from internally regulated processes (apoptosis). Addition to the culture of activating factors, such as TNF-alpha dramatically improves cell survival and prevents DNA fragmentation. Propidium iodide (PI) staining is used to measure apoptosis as follows. Monocytes are cultured for 48 hours in polypropylene tubes in serum-free medium (positive control), in the presence of 100 ng/ml TNF-alpha (negative control), and in the presence of varying concentrations of the compound to be tested. Cells are suspended at a concentration of 2×10⁶/ml in PBS containing PI at a final concentration of 5 μg/ml, and then incubated at room temperature for 5 minutes before FACScan analysis. PI uptake has been demonstrated to correlate with DNA fragmentation in this experimental paradigm.

[1082] Effect on cytokine release. An important function of monocytes/macrophages is their regulatory activity on other cellular populations of the immune system through the release of cytokines after stimulation. An ELISA to measure cytokine release is performed as follows. Human monocytes are incubated at a density of 5×10⁵ cells/ml with increasing concentrations of agonists or antagonists of the invention and under the same conditions, but in the absence of agonists or antagonists. For IL-12 production, the cells are primed overnight with IFN (100 U/ml) in the presence of agonist or antagonist of the invention. LPS (10 ng/ml) is then added. Conditioned media are collected after 24 h and kept frozen until use. Measurement of TNF-alpha, IL-10, MCP-1 and IL-8 is then performed using a commercially available ELISA kit (e.g., R & D Systems (Minneapolis, Minn.)) and applying the standard protocols provided with the kit.

[1083] Oxidative burst. Purified monocytes are plated in 96-w plate at 2-1×10⁵ cell/well. Increasing concentrations of agonists or antagonists of the invention are added to the wells in a total volume of 0.2 ml culture medium (RPMI 1640+10% FCS, glutamine and antibiotics). After 3 days incubation, the plates are centrifuged and the medium is removed from the wells. To the macrophage monolayers, 0.2 ml per well of phenol red solution (140 mM NaCl, 10 mM potassium phosphate buffer pH 7.0, 5.5 mM dextrose, 0.56 mM phenol red and 19 U/ml of HRPO) is added, together with the stimulant (200 nM PMA). The plates are incubated at 37° C. for 2 hours and the reaction is stopped by adding 20 μl 1N NaOH per well. The absorbance is read at 610 nm. To calculate the amount of H₂O₂ produced by the macrophages, a standard curve of a H₂O₂ solution of known molarity is performed for each experiment.

[1084] The studies described in this example tested activity of agonists or antagonists of the invention. However, one skilled in the art could easily modify the exemplified studies to test the activity of polynucleotides or polypeptides of the invention (e.g., gene therapy).

### Example 24

### Biological Effects of Agonists or Antagonists of the Invention

[1085] Astrocyte and Neuronal Assays

[1086] Agonists or antagonists of the invention, expressed in Escherichia coli and purified as described above, can be tested for activity in promoting the survival, neurite outgrowth, or phenotypic differentiation of cortical neuronal cells and for inducing the proliferation of glial fibrillary acidic protein immunopositive cells, astrocytes. The selection of cortical cells for the bioassay is based on the prevalent expression of FGF-1 and FGF-2 in cortical structures and on the previously reported enhancement of cortical neuronal survival resulting from FGF-2 treatment. A thymidine incorporation assay, for example, can be used to elucidate an agonist or antagonist of the invention's activity on these cells.

[1087] Moreover, previous reports describing the biological effects of FGF-2 (basic FGF) on cortical or hippocampal neurons in vitro have demonstrated increases in both neuron survival and neurite outgrowth (Walicke et al., “Fibroblast growth factor promotes survival of dissociated hippocampal neurons and enhances neurite extension.” Proc. Natl. Acad. Sci. USA 83:3012-3016. (1986), assay herein incorporated by reference in its entirety). However, reports from experiments done on PC-12 cells suggest that these two responses are not necessarily synonymous and may depend on not only which FGF is being tested but also on which receptor(s) are expressed on the target cells. Using the primary cortical neuronal culture paradigm, the ability of an agonist or antagonist of the invention to induce neurite outgrowth can be compared to the response achieved with FGF-2 using, for example, a thymidine incorporation assay.

[1088] Fibroblast and Endothelial Cell Assays

[1089] Human lung fibroblasts are obtained from Clonetics (San Diego, Calif.) and maintained in growth media from Clonetics. Dermal microvascular endothelial cells are obtained from Cell Applications (San Diego, Calif.). For proliferation assays, the human lung fibroblasts and dermal microvascular endothelial cells can be cultured at 5,000 cells/well in a 96-well plate for one day in growth medium. The cells are then incubated for one day in 0.1% BSA basal medium. After replacing the medium with fresh 0.1% BSA medium, the cells are incubated with the test proteins for 3 days. Alamar Blue (Alamar Biosciences, Sacramento, Calif.) is added to each well to a final concentration of 10%. The cells are incubated for 4 hr. Cell viability is measured by reading in a CytoFluor fluorescence reader. For the PGE₂ assays, the human lung fibroblasts are cultured at 5,000 cells/well in a 96-well plate for one day. After a medium change to 0.1% BSA basal medium, the cells are incubated with FGF-2 or agonists or antagonists of the invention with or without IL-1α for 24 hours. The supernatants are collected and assayed for PGE₂ by EIA kit (Cayman, Ann Arbor, Mich.). For the IL-6 assays, the human lung fibroblasts are cultured at 5,000 cells/well in a 96-well plate for one day. After a medium change to 0.1% BSA basal medium, the cells are incubated with FGF-2 or with or without agonists or antagonists of the invention IL-1α for 24 hours. The supernatants are collected and assayed for IL-6 by ELISA kit (Endogen, Cambridge, Mass.).

[1090] Human lung fibroblasts are cultured with FGF-2 or agonists or antagonists of the invention for 3 days in basal medium before the addition of Alamar Blue to assess effects on growth of the fibroblasts. FGF-2 should show a stimulation at 10-2500 ng/ml which can be used to compare stimulation with agonists or antagonists of the invention.

[1091] Parkinson Models.

[1092] The loss of motor function in Parkinson's disease is attributed to a deficiency of striatal dopamine resulting from the degeneration of the nigrostriatal dopaminergic projection neurons. An animal model for Parkinson's that has been extensively characterized involves the systemic administration of 1-methyl-4 phenyl 1,2,3,6-tetrahydropyridine (MPTP). In the CNS, MPTP is taken-up by astrocytes and catabolized by monoamine oxidase B to 1-methyl-4-phenyl pyridine (MPP⁺) and released. Subsequently, MPP⁺ is actively accumulated in dopaminergic neurons by the high-affinity reuptake transporter for dopamine. MPP⁺ is then concentrated in mitochondria by the electrochemical gradient and selectively inhibits nicotidamide adenine disphosphate: ubiquinone oxidoreductionase (complex I), thereby interfering with electron transport and eventually generating oxygen radicals.

[1093] It has been demonstrated in tissue culture paradigms that FGF-2 (basic FGF) has trophic activity towards nigral dopaminergic neurons (Ferrari et al., Dev. Biol. 1989). Recently, Dr. Unsicker's group has demonstrated that administering FGF-2 in gel foam implants in the striatum results in the near complete protection of nigral dopaminergic neurons from the toxicity associated with MPTP exposure (Otto and Unsicker, J. Neuroscience, 1990).

[1094] Based on the data with FGF-2, agonists or antagonists of the invention call be evaluated to determine whether it has an action similar to that of FGF-2 in enhancing dopaminergic neuronal survival in vitro and it can also be tested in vivo for protection of dopaminergic neurons in the striatum from the damage associated with MPTP treatment. The potential effect of an agonist or antagonist of the invention is first examined in vitro in a dopaminergic neuronal cell culture paradigm. The cultures are prepared by dissecting the midbrain floor plate from gestation day 14 Wistar rat embryos. The tissue is dissociated with trypsin and seeded at a density of 200,000 cells/cm² on polyorthinine-laminin coated glass coverslips. The cells are maintained in Dulbecco's Modified Eagle's medium and F12 medium containing hormonal supplements (N1). The cultures are fixed with paraformaldehyde after 8 days in vitro and are processed for tyrosine hydroxylase, a specific marker for dopaminergic neurons, immunohistochemical staining. Dissociated cell cultures are prepared from embryonic rats. The culture medium is changed every third day and the factors are also added at that time.

[1095] Since the dopaminergic neurons are isolated from animals at gestation day 14, a developmental time which is past the stage when the dopaminergic precursor cells are proliferating, an increase in the number of tyrosine hydroxylase immunopositive neurons would represent an increase in the number of dopaminergic neurons surviving in vitro. Therefore, if an agonist or antagonist of the invention acts to prolong the survival of dopaminergic neurons, it would suggest that the agonist or antagonist may be involved in Parkinson's Disease.

[1096] The studies described in this example tested activity of agonists or antagonists of the invention. However, one skilled in the art could easily modify the exemplified studies to test the activity of polynucleotides or polypeptides of the invention (e.g., gene therapy).

### Example 25

### The Effect of Agonists or Antagonists of the Invention on the Growth of Vascular Endothelial Cells

[1097] On day 1, human umbilical vein endothelial cells (HUVEC) are seeded at 2-5×10⁴ cells/35 mm dish density in M199 medium containing 4% fetal bovine serum (FBS), 16 units/ml heparin, and 50 units/ml endothelial cell growth supplements (ECGS, Biotechnique, Inc.). On day 2, the medium is replaced with Ml 99 containing 10% FBS, 8 units/ml heparin. An agonist or antagonist of the invention, and positive controls, such as VEGF and basic FGF (bFGF) are added, at varying concentrations. On days 4 and 6, the medium is replaced. On day 8, cell number is determined with a Coulter Counter.

[1098] An increase in the number of HUVEC cells indicates that the compound of the invention may proliferate vascular endothelial cells, while a decrease in the number of HUVEC cells indicates that the compound of the invention inhibits vascular endothelial cells.

[1099] The studies described in this example tested activity of a polypeptide of the invention. However, one skilled in the art could easily modify the exemplified studies to test the activity of polynucleotides (e.g., gene therapy), agonists, and/or antagonists of the invention.

### Example 26

### Rat Corneal Wound Healing Model

[1100] This animal model shows the effect of an agonist or antagonist of the invention on neovascularization. The experimental protocol includes:

[1101] a) Making a 1-1.5 mm long incision from the center of cornea into the stromal layer.

[1102] b) Inserting a spatula below the lip of the incision facing the outer corner of the eye.

[1103] c) Making a pocket (its base is 1-1.5 mm form the edge of the eye).

[1104] d) Positioning a pellet, containing 50 ng-5 ug of an agonist or antagonist of the invention, within the pocket.

[1105] e) Treatment with an agonist or antagonist of the invention can also be applied topically to the corneal wounds in a dosage range of 20 mg-500 mg (daily treatment for five days).

[1106] The studies described in this example tested activity of agonists or antagonists of the invention. However, one skilled in the art could easily modify the exemplified studies to test the activity of polynucleotides or polypeptides of the invention (e.g., gene therapy).

### Example 27

### Diabetic Mouse and Glucocorticoid-Impaired Wound Healing Models

[1107] Diabetic db+/db+ Mouse Model.

[1108] To demonstrate that an agonist or antagonist of the invention accelerates the healing process, the genetically diabetic mouse model of wound healing is used. The full thickness wound healing model in the db+/db+ mouse is a well characterized, clinically relevant and reproducible model of impaired wound healing. Healing of the diabetic wound is dependent on formation of granulation tissue and re-epithelialization rather than contraction (Gartner, M. H. et al., J. Surg. Res. 52:389 (1992); Greenhalgh, D. G. et al., Am. J. Pathol. 136:1235 (1990)).

[1109] The diabetic animals have many of the characteristic features observed in Type II diabetes mellitus. Homozygous (db+/db+) mice are obese in comparison to their normal heterozygous (db+/+m) littermates. Mutant diabetic (db+/db+) mice have a single autosomal recessive mutation on chromosome 4 (db+) (Coleman et al. Proc. Nat?. Acad. Sci. USA 77:283-293 (1982)). Animals show polyphagia, polydipsia and polyuria. Mutant diabetic mice (db+/db+) have elevated blood glucose, increased or normal insulin levels, and suppressed cell-mediated immunity (Mandel et al., J. Immunol. 120:1375 (1978); Debray-Sachs, M. et al., Clin. Exp. Immunol. 51(1):1-7 (1983); Leiter et al., Am. J. of Pathol. 114:46-55 (1985)). Peripheral neuropathy, myocardial complications, and microvascular lesions, basement membrane thickening and glomerular filtration abnormalities have been described in these animals (Norido, F. et al., Exp. Neurol. 83(2):221-232 (1984); Robertson et al., Diabetes 29(1):60-67 (1980); Giacomelli et al., Lab Invest. 40(4):460-473 (1979); Coleman, D. L., Diabetes 31 (Suppl):1-6 (1982)). These homozygous diabetic mice develop hyperglycemia that is resistant to insulin analogous to human type II diabetes (Mandel et al., J. Immunol. 120:1375-1377 (1978)).

[1110] The characteristics observed in these animals suggests that healing in this model may be similar to the healing observed in human diabetes (Greenhalgh, et al., Am. J. of Pathol. 136:1235-1246 (1990)).

[1111] Genetically diabetic female C57BL/KsJ (db+/db+) mice and their non-diabetic (db+/+m) heterozygous littermates are used in this study (Jackson Laboratories). The animals are purchased at 6 weeks of age and are 8 weeks old at the beginning of the study. Animals are individually housed and received food and water ad libitum. All manipulations are performed using aseptic techniques. The experiments are conducted according to the rules and guidelines of Human Genome Sciences, Inc. Institutional Animal Care and Use Committee and the Guidelines for the Care and Use of Laboratory Animals.

[1112] Wounding protocol is performed according to previously reported methods (Tsuboi, R. and Rifkin, D. B., J. Exp. Med. 172:245-251 (1990)). Briefly, on the day of wounding, animals are anesthetized with an intraperitoneal injection of Avertin (0.01 mg/mL), 2,2,2-tribromoethanol and 2-methyl-2-butanol dissolved in deionized water. The dorsal region of the animal is shaved and the skin washed with 70% ethanol solution and iodine. The surgical area is dried with sterile gauze prior to wounding. An 8 mm full-thickness wound is then created using a Keyes tissue punch. Immediately following wounding, the surrounding skin is gently stretched to eliminate wound expansion. The wounds are left open for the duration of the experiment. Application of the treatment is given topically for 5 consecutive days commencing on the day of wounding. Prior to treatment, wounds are gently cleansed with sterile saline and gauze sponges.

[1113] Wounds are visually examined and photographed at a fixed distance at the day of surgery and at two day intervals thereafter. Wound closure is determined by daily measurement on days 1-5 and on day 8. Wounds are measured horizontally and vertically using a calibrated Jameson caliper. Wounds are considered healed if granulation tissue is no longer visible and the wound is covered by a continuous epithelium.

[1114] An agonist or antagonist of the invention is administered using at a range different doses, from 4 mg to 500 mg per wound per day for 8 days in vehicle. Vehicle control groups received 50 mL of vehicle solution.

[1115] Animals are euthanized on day 8 with an intraperitoneal injection of sodium pentobarbital (300 mg/kg). The wounds and surrounding skin are then harvested for histology and immunohistochemistry. Tissue specimens are placed in 10% neutral buffered formalin in tissue cassettes between biopsy sponges for further processing.

[1116] Three groups of 10 animals each (5 diabetic and 5 non-diabetic controls) are evaluated: 1) Vehicle placebo control, 2) untreated group, and 3) treated group.

[1117] Wound closure is analyzed by measuring the area in the vertical and horizontal axis and obtaining the total square area of the wound. Contraction is then estimated by establishing the differences between the initial wound area (day 0) and that of post treatment (day 8). The wound area on day 1 is 64 mm², the corresponding size of the dermal punch. Calculations are made using the following formula:

[Open area on day 8]−[Open area on day 1]/[Open area on day 1]

[1118] Specimens are fixed in 10% buffered formalin and paraffin embedded blocks are sectioned perpendicular to the wound surface (5 mm) and cut using a Reichert-Jung microtome. Routine hematoxylin-eosin (H&E) staining is performed on cross-sections of bisected wounds. Histologic examination of the wounds are used to assess whether the healing process and the morphologic appearance of the repaired skin is altered by treatment with an agonist or antagonist of the invention. This assessment included verification of the presence of cell accumulation, inflammatory cells, capillaries, fibroblasts, re-epithelialization and epidermal maturity (Greenhalgh, D. G. et al., Am. J. Pathol. 136:1235 (1990)). A calibrated lens micrometer is used by a blinded observer.

[1119] Tissue sections are also stained immunohistochemically with a polyclonal rabbit anti-human keratin antibody using ABC Elite detection system. Human skin is used as a positive tissue control while non-immune IgG is used as a negative control. Keratinocyte growth is determined by evaluating the extent of reepithelialization of the wound using a calibrated lens micrometer.

[1120] Proliferating cell nuclear antigen/cyclin (PCNA) in skin specimens is demonstrated by using anti-PCNA antibody (1:50) with an ABC Elite detection system. Human colon cancer served as a positive tissue control and human brain tissue is used as a negative tissue control. Each specimen included a section with omission of the primary antibody and substitution with non-immune mouse IgG. Ranking of these sections is based on the extent of proliferation on a scale of 0-8, the lower side of the scale reflecting slight proliferation to the higher side reflecting intense proliferation.

[1121] Experimental data are analyzed using an unpaired t test. A p value of <0.05 is considered significant.

[1122] Steroid Impaired Rat Model

[1123] The inhibition of wound healing by steroids has been well documented in various in vitro and in vivo systems (Wahl, Glucocorticoids and Wound healing. In: Anti-Inflammatory Steroid Action: Basic and Clinical Aspects. 280-302 (1989); Wahlet al., J. Immunol. 115: 476-481 (1975); Werb et al., J. Exp. Med. 147:1684-1694 (1978)). Glucocorticoids retard wound healing by inhibiting angiogenesis, decreasing vascular permeability (Ebert et al., An. Intern. Med. 37:701-705 (1952)), fibroblast proliferation, and collagen synthesis (Beck et al., Growth Factors. 5: 295-304 (1991); Haynes et al., J. Clin. Invest. 61: 703-797 (1978)) and producing a transient reduction of circulating monocytes (Haynes et al., J. Clin. Invest. 61: 703-797 (1978); Wahl, “Glucocorticoids and wound healing”, In: Antiinflammatory Steroid Action: Basic and Clinical Aspects, Academic Press, New York, pp. 280-302 (1989)). The systemic administration of steroids to impaired wound healing is a well establish phenomenon in rats (Beck et al., Growth Factors. 5: 295-304 (1991); Haynes et al., J. Clin. Invest. 61: 703-797 (1978); Wahl, “Glucocorticoids and wound healing”, In: Antiinflammatory Steroid Action: Basic and Clinical Aspects, Academic Press, New York, pp. 280-302 (1989); Pierce et al., Proc. Natl. Acad. Sci. USA 86: 2229-2233 (1989)).

[1124] To demonstrate that an agonist or antagonist of the invention can accelerate the healing process, the effects of multiple topical applications of the agonist or antagonist on full thickness excisional skin wounds in rats in which healing has been impaired by the systemic administration of methylprednisolone is assessed.

[1125] Young adult male Sprague Dawley rats weighing 250-300 g (Charles River Laboratories) are used in this example. The animals are purchased at 8 weeks of age and are 9 weeks old at the beginning of the study. The healing response of rats is impaired by the systemic administration of methylprednisolone (17 mg/kg/rat intramuscularly) at the time of wounding. Animals are individually housed and received food and water ad libitum. All manipulations are performed using aseptic techniques. This study is conducted according to the rules and guidelines of Human Genome Sciences, Inc. Institutional Animal Care and Use Committee and the Guidelines for the Care and Use of Laboratory Animals.

[1126] The wounding protocol is followed according to section A, above. On the day of wounding, animals are anesthetized with an intramuscular injection of ketamine (50 mg/kg) and xylazine (5 mg/kg). The dorsal region of the animal is shaved and the skin washed with 70% ethanol and iodine solutions. The surgical area is dried with sterile gauze prior to wounding. An 8 mm full-thickness wound is created using a Keyes tissue punch. The wounds are left open for the duration of the experiment. Applications of the testing materials are given topically once a day for 7 consecutive days commencing on the day of wounding and subsequent to methylprednisolone administration. Prior to treatment, wounds are gently cleansed with sterile saline and gauze sponges.

[1127] Wounds are visually examined and photographed at a fixed distance at the day of wounding and at the end of treatment. Wound closure is determined by daily measurement on days 1-5 and on day 8. Wounds are measured horizontally and vertically using a calibrated Jameson caliper. Wounds are considered healed if granulation tissue is no longer visible and the wound is covered by a continuous epithelium.

[1128] The agonist or antagonist of the invention is administered using at a range different doses, from 4 mg to 500 mg per wound per day for 8 days in vehicle. Vehicle control groups received 50 mL of vehicle solution.

[1129] Animals are euthanized on day 8 with an intraperitoneal injection of sodium pentobarbital (300 mg/kg). The wounds and surrounding skin are then harvested for histology. Tissue specimens are placed in 10% neutral buffered formalin in tissue cassettes between biopsy sponges for further processing.

[1130] Three groups of 10 animals each (5 with methylprednisolone and 5 without glucocorticoid) are evaluated: 1) Untreated group 2) Vehicle placebo control 3) treated groups.

[1131] Wound closure is analyzed by measuring the area in the vertical and horizontal axis and obtaining the total area of the wound. Closure is then estimated by establishing the differences between the initial wound area (day 0) and that of post treatment (day 8). The wound area on day 1 is 64 mm², the corresponding size of the dermal punch. Calculations are made using the following formula:

[Open area on day 8]−[Open area on day 1]/[Open area on day 1]

[1132] Specimens are fixed in 10% buffered formalin and paraffin embedded blocks are sectioned perpendicular to the wound surface (5 mm) and cut using an Olympus microtome. Routine hematoxylin-eosin (H&E) staining is performed on cross-sections of bisected wounds. Histologic examination of the wounds allows assessment of whether the healing process and the morphologic appearance of the repaired skin is improved by treatment with an agonist or antagonist of the invention. A calibrated lens micrometer is used by a blinded observer to determine the distance of the wound gap.

[1133] Experimental data are analyzed using an unpaired t test. A p value of <0.05 is considered significant.

[1134] The studies described in this example tested activity of agonists or antagonists of the invention. However, one skilled in the art could easily modify the exemplified studies to test the activity of polynucleotides or polypeptides of the invention (e.g., gene therapy).

### Example 28

### Lymphadema Animal Model

[1135] The purpose of this experimental approach is to create an appropriate and consistent lymphedema model for testing the therapeutic effects of an agonist or antagonist of the invention in lymphangiogenesis and re-establishment of the lymphatic circulatory system in the rat hind limb. Effectiveness is measured by swelling volume of the affected limb, quantification of the amount of lymphatic vasculature, total blood plasma protein, and histopathology. Acute lymphedema is observed for 7-10 days. Perhaps more importantly, the chronic progress of the edema is followed for up to 3-4 weeks.

[1136] Prior to beginning surgery, blood sample is drawn for protein concentration analysis. Male rats weighing approximately ˜350 g are dosed with Pentobarbital. Subsequently, the right legs are shaved from knee to hip. The shaved area is swabbed with gauze soaked in 70% EtOH. Blood is drawn for serum total protein testing. Circumference and volumetric measurements are made prior to injecting dye into paws after marking 2 measurement levels (0.5 cm above heel, at mid-pt of dorsal paw). The intradermal dorsum of both right and left paws are injected with 0.05 ml of 1% Evan's Blue. Circumference and volumetric measurements are then made following injection of dye into paws.

[1137] Using the knee joint as a landmark, a mid-leg inguinal incision is made circumferentially allowing the femoral vessels to be located. Forceps and hemostats are used to dissect and separate the skin flaps. After locating the femoral vessels, the lymphatic vessel that runs along side and underneath the vessel(s) is located. The main lymphatic vessels in this area are then electrically coagulated or suture ligated.

[1138] Using a microscope, muscles in back of the leg (near the semitendinosis and adductors) are bluntly dissected. The popliteal lymph node is then located. The 2 proximal and 2 distal lymphatic vessels and distal blood supply of the popliteal node are then ligated by suturing. The popliteal lymph node, and any accompanying adipose tissue, is then removed by cutting connective tissues.

[1139] Care is taken to control any mild bleeding resulting from this procedure. After lymphatics are occluded, the skin flaps are sealed by using liquid skin (Vetbond) (AJ Buck). The separated skin edges are sealed to the underlying muscle tissue while leaving a gap of ˜0.5 cm around the leg. Skin also may be anchored by suturing to underlying muscle when necessary.

[1140] To avoid infection, animals are housed individually with mesh (no bedding). Recovering animals are checked daily through the optimal edematous peak, which typically occurred by day 5-7. The plateau edematous peak are then observed. To evaluate the intensity of the lymphedema, the circumference and volumes of 2 designated places on each paw before operation and daily for 7 days are measured. The effect of plasma proteins on lymphedema is determined and whether protein analysis is a useful testing perimeter is also investigated. The weights of both control and edematous limbs are evaluated at 2 places. Analysis is performed in a blind manner.

[1141] Circumference Measurements: Under brief gas anesthetic to prevent limb movement, a cloth tape is used to measure limb circumference. Measurements are done at the ankle bone and dorsal paw by 2 different people and those 2 readings are averaged. Readings are taken from both control and edematous limbs.

[1142] Volumetric Measurements: On the day of surgery, animals are anesthetized with Pentobarbital and are tested prior to surgery. For daily volumetrics animals are under brief halothane anesthetic (rapid immobilization and quick recovery), and both legs are shaved and equally marked using waterproof marker on legs. Legs are first dipped in water, then dipped into instrument to each marked level then measured by Buxco edema software(Chen/Victor). Data is recorded by one person, while the other is dipping the limb to marked area.

[1143] Blood-plasma protein measurements: Blood is drawn, spun, and serum separated prior to surgery and then at conclusion for total protein and Ca²⁺ comparison.

[1144] Limb Weight Comparison: After drawing blood, the animal is prepared for tissue collection. The limbs are amputated using a quillitine, then both experimental and control legs are cut at the ligature and weighed. A second weighing is done as the tibio-cacaneal joint is disarticulated and the foot is weighed.

[1145] Histological Preparations: The transverse muscle located behind the knee (popliteal) area is dissected and arranged in a metal mold, filled with freezeGel, dipped into cold methylbutane, placed into labeled sample bags at −80EC until sectioning. Upon sectioning, the muscle is observed under fluorescent microscopy for lymphatics.

[1146] The studies described in this example tested activity of agonists or antagonists of the invention. However, one skilled in the art could easily modify the exemplified studies to test the activity of polynucleotides or polypeptides of the invention (e.g., gene therapy).

### Example 29

### Suppression of TNF Alpha-Induced Adhesion Molecule Expression by an Agonist or Antagonist of the Invention

[1147] The recruitment of lymphocytes to areas of inflammation and angiogenesis involves specific receptor-ligand interactions between cell surface adhesion molecules (CAMs) on lymphocytes and the vascular endothelium. The adhesion process, in both normal and pathological settings, follows a multi-step cascade that involves intercellular adhesion molecule-1 (ICAM-1), vascular cell adhesion molecule-1 (VCAM-1), and endothelial leukocyte adhesion molecule-1 (E-selectin) expression on endothelial cells (EC). The expression of these molecules and others on the vascular endothelium determines the efficiency with which leukocytes may adhere to the local vasculature and extravasate into the local tissue during the development of an inflammatory response. The local concentration of cytokines and growth factor participate in the modulation of the expression of these CAMs.

[1148] Tumor necrosis factor alpha (TNF-a), a potent proinflammatory cytokine, is a stimulator of all three CAMs on endothelial cells and may be involved in a wide variety of inflammatory responses, often resulting in a pathological outcome.

[1149] The potential of an agonist or antagonist of the invention to mediate a suppression of TNF-a induced CAM expression can be examined. A modified ELISA assay which uses ECs as a solid phase absorbent is employed to measure the amount of CAM expression on TNF-a treated ECs when co-stimulated with a member of the FGF family of proteins.

[1150] To perform the experiment, human umbilical vein endothelial cell (HUVEC) cultures are obtained from pooled cord harvests and maintained in growth medium (EGM-2; Clonetics, San Diego, Calif.) supplemented with 10% FCS and 1% penicillin/streptomycin in a 37 degree C. humidified incubator containing 5% CO₂. HUVECs are seeded in 96-well plates at concentrations of 1×10⁴ cells/well in EGM medium at 37 degree C. for 18-24 hrs or until confluent. The monolayers are subsequently washed 3 times with a serum-free solution of RPMI-1640 supplemented with 100 U/ml penicillin and 100 mg/ml streptomycin, and treated with a given cytokine and/or growth factor(s) for 24 h at 37 degree C. Following incubation, the cells are then evaluated for CAM expression.

[1151] Human Umbilical Vein Endothelial cells (HUVECs) are grown in a standard 96 well plate to confluence. Growth medium is removed from the cells and replaced with 90 ul of 199 Medium (10% FBS). Samples for testing and positive or negative controls are added to the plate in triplicate (in 10 ul volumes). Plates are incubated at 37 degree C. for either 5 h (selectin and integrin expression) or 24 h (integrin expression only). Plates are aspirated to remove medium and 100 μl of 0.1% paraformaldehyde-PBS(with Ca++ and Mg++) is added to each well. Plates are held at 4° C. for 30 min.

[1152] Fixative is then removed from the wells and wells are washed 1× with PBS(+Ca,Mg)+0.5% BSA and drained. Do not allow the wells to dry. Add 10 μl of diluted primary antibody to the test and control wells. Anti-ICAM-1-Biotin, Anti-VCAM-1-Biotin and Anti-E-selectin-Biotin are used at a concentration of 10 μg/ml (1:10 dilution of 0.1 mg/ml stock antibody). Cells are incubated at 37° C. for 30 min. in a humidified environment. Wells are washed ×3 with PBS(+Ca,Mg)+0.5% BSA.

[1153] Then add 20 μl of diluted ExtrAvidin-Alkaline Phosphotase (1:5,000 dilution) to each well and incubated at 37° C. for 30 min. Wells are washed X3 with PBS(+Ca,Mg)+0.5% BSA. 1 tablet of p-Nitrophenol Phosphate pNPP is dissolved in 5 ml of glycine buffer (pH 10.4). 100 μl of pNPP substrate in glycine buffer is added to each test well. Standard wells in triplicate are prepared from the working dilution of the ExtrAvidin-Alkaline Phosphotase in glycine buffer: 1:5,000 (10⁰)>10^{-0.5}>10⁻¹>10^{-1.5}. 5 μl of each dilution is added to triplicate wells and the resulting AP content in each well is 5.50 ng, 1.74 ng, 0.55 ng, 0.18 ng. 100 μl of pNNP reagent must then be added to each of the standard wells. The plate must be incubated at 37° C. for 4 h. A volume of 50 μl of 3M NaOH is added to all wells. The results are quantified on a plate reader at 405 nm. The background subtraction option is used on blank wells filled with glycine buffer only. The template is set up to indicate the concentration of AP-conjugate in each standard well [5.50 ng; 1.74 ng; 0.55 ng; 0.18 ng]. Results are indicated as amount of bound AP-conjugate in each sample.

[1154] The studies described in this example tested activity of agonists or antagonists of the invention. However, one skilled in the art could easily modify the exemplified studies to test the activity of polynucleotides or polypeptides of the invention (e.g., gene therapy).

### Example 30

### Production of Polypeptide of the Invention For High-Throughput Screening Assays

[1155] The following protocol produces a supernatant containing polypeptide of the present invention to be tested. This supernatant can then be used in the Screening Assays described in Examples 32-41.

[1156] First, dilute Poly-D-Lysine (644 587 Boehringer-Mannheim) stock solution (1 mg/ml in PBS) 1:20 in PBS (w/o calcium or magnesium 17-516F Biowhittaker) for a working solution of 50 ug/ml. Add 200 ul of this solution to each well (24 well plates) and incubate at RT for 20 minutes. Be sure to distribute the solution over each well (note: a 12-channel pipetter may be used with tips on every other channel). Aspirate off the Poly-D-Lysine solution and rinse with 1 ml PBS (Phosphate Buffered Saline). The PBS should remain in the well until just prior to plating the cells and plates may be poly-lysine coated in advance for up to two weeks.

[1157] Plate 293T cells (do not carry cells past P+20) at 2×10⁵ cells/well in 0.5 ml DMEM(Dulbecco's Modified Eagle Medium)(with 4.5 G/L glucose and L-glutamine (12-604F Biowhittaker))/10% heat inactivated FBS(14-503F Biowhittaker)/1×Penstrep(17-602E Biowhittaker). Let the cells grow overnight.

[1158] The next day, mix together in a sterile solution basin: 300 ul Lipofectamine (18324-012 Gibco/BRL) and 5 ml Optimem 1 (31985070 Gibco/BRL)/96-well plate. With a small volume multi-channel pipetter, aliquot approximately 2 ug of an expression vector containing a polynucleotide insert, produced by the methods described in Examples 8-10, into an appropriately labeled 96-well round bottom plate. With a multi-channel pipetter, add 50 ul of the Lipofectamine/Optimem I mixture to each well. Pipette up and down gently to mix. Incubate at RT 15-45 minutes. After about 20 minutes, use a multi-channel pipetter to add 150 ul Optimem I to each well. As a control, one plate of vector DNA lacking an insert should be transfected with each set of transfections.

[1159] Preferably, the transfection should be performed by tag-teaming the following tasks. By tag-teaming, hands on time is cut in half, and the cells do not spend too much time on PBS. First, person A aspirates off the media from four 24-well plates of cells, and then person B rinses each well with 0.5-1 ml PBS. Person A then aspirates off PBS rinse, and person B, using al2-channel pipetter with tips on every other channel, adds the 200 ul of DNA/Lipofectamine/Optimem I complex to the odd wells first, then to the even wells, to each row on the 24-well plates. Incubate at 37 degree C. for 6 hours.

[1160] While cells are incubating, prepare appropriate media, either 1%BSA in DMEM with 1× penstrep, or HGS CHO-5 media (116.6 mg/L of CaCl₂ (anhyd); 0.00130 mg/L CuSO₄-5H₂O; 0.050 mg/L of Fe(NO₃)₃-9H₂O; 0.417 mg/L of FeSO₄-7H₂O; 311.80 mg/L of Kcl; 28.64 mg/L of MgCl₂; 48.84 mg/L of MgSO₄; 6995.50 mg/L of NaCl; 2400.0 mg/L of NaHCO₃; 62.50 mg/L of NaH₂PO₄—H₂O; 71.02 mg/L of Na₂HPO4; 0.4320 mg/L of ZnSO₄-7H₂O; 0.002 mg/L of Arachidonic Acid; 1.022 mg/L of Cholesterol; 0.070 mg/L of DL-alpha-Tocopherol-Acetate; 0.0520 mg/L of Linoleic Acid; 0.010 mg/L of Linolenic Acid; 0.010 mg/L of Myristic Acid; 0.010 mg/L of Oleic Acid; 0.010 mg/L of Palmitric Acid; 0.010 mg/L of Palmitic Acid; 100 mg/L of Pluronic F-68; 0.010 mg/L of Stearic Acid; 2.20 mg/L of Tween 80; 4551 mg/L of D-Glucose; 130.85 mg/ml of L-Alanine; 147.50 mg/ml of L-Arginine-HCL; 7.50 mg/ml of L-Asparagine-H₂O; 6.65 mg/ml of L-Aspartic Acid; 29.56 mg/ml of L-Cystine-2HCL-H₂O; 31.29 mg/ml of L-Cystine-2HCL; 7.35 mg/ml of L-Glutamic Acid; 365.0 mg/ml of L-Glutamine; 18.75 mg/ml of Glycine; 52.48 mg/ml of L-Histidine-HCL-H₂O; 106.97 mg/ml of L-Isoleucine; 111.45 mg/ml of L-Leucine; 163.75 mg/ml of L-Lysine HCL; 32.34 mg/ml of L-Methionine; 68.48 mg/ml of L-Phenylalainine; 40.0 mg/ml of L-Proline; 26.25 mg/ml of L-Serine; 101.05 mg/ml of L-Threonine; 19.22 mg/ml of L-Tryptophan; 91.79 mg/ml of L-Tryrosine-2Na-2H₂O; and 99.65 mg/ml of L-Valine; 0.0035 mg/L of Biotin; 3.24 mg/L of D-Ca Pantothenate; 11.78 mg/L of Choline Chloride; 4.65 mg/L of Folic Acid; 15.60 mg/L of i-Inositol; 3.02 mg/L of Niacinamide; 3.00 mg/L of Pyridoxal HCL; 0.031 mg/L of Pyridoxine HCL; 0.319 mg/L of Riboflavin; 3.17 mg/L of Thiamine HCL; 0.365 mg/L of Thymidine; 0.680 mg/L of Vitamin B12; 25 mM of HEPES Buffer; 2.39 mg/L of Na Hypoxanthine; 0.105 mg/L of Lipoic Acid; 0.081 mg/L of Sodium Putrescine-2HCL; 55.0 mg/L of Sodium Pyruvate; 0.0067 mg/L of Sodium Selenite; 20 uM of Ethanolamine; 0.122 mg/L of Ferric Citrate; 41.70 mg/L of Methyl-B-Cyclodextrin complexed with Linoleic Acid; 33.33 mg/L of Methyl-B-Cyclodextrin complexed with Oleic Acid; 10 mg/L of Methyl-B-Cyclodextrin complexed with Retinal Acetate. Adjust osmolarity to 327 mOsm) with 2 mm glutamine and 1× penstrep. (BSA (81-068-3 Bayer) 100 gm dissolved in IL DMEM for a 10% BSA stock solution). Filter the media and collect 50 ul for endotoxin assay in 15 ml polystyrene conical.

[1161] The transfection reaction is terminated, preferably by tag-teaming, at the end of the incubation period. Person A aspirates off the transfection media, while person B adds 1.5 ml appropriate media to each well. Incubate at 37 degree C. for 45 or 72 hours depending on the media used: 1%BSA for 45 hours or CHO-5 for 72 hours.

[1162] On day four, using a 300 ul multichannel pipetter, aliquot 600 ul in one 1 ml deep well plate and the remaining supernatant into a 2 ml deep well. The supernatants from each well can then be used in the assays described in Examples 32-39.

[1163] It is specifically understood that when activity is obtained in any of the assays described below using a supernatant, the activity originates from either the polypeptide of the present invention directly (e.g., as a secreted protein) or by polypeptide of the present invention inducing expression of other proteins, which are then secreted into the supernatant. Thus, the invention further provides a method of identifying the protein in the supernatant characterized by an activity in a particular assay.

### Example 31

### Construction of GAS Reporter Construct

[1164] One signal transduction pathway involved in the differentiation and proliferation of cells is called the Jaks-STATs pathway. Activated proteins in the Jaks-STATs pathway bind to gamma activation site “GAS” elements or interferon-sensitive responsive element (“ISRE”), located in the promoter of many genes. The binding of a protein to these elements alter the expression of the associated gene.

[1165] GAS and ISRE elements are recognized by a class of transcription factors called Signal Transducers and Activators of Transcription, or “STATs.” There are six members of the STATs family. Stat1 and Stat3 are present in many cell types, as is Stat2 (as response to IFN-alpha is widespread). Stat4 is more restricted and is not in many cell types though it has been found in T helper class I, cells after treatment with IL-12. Stat5 was originally called mammary growth factor, but has been found at higher concentrations in other cells including myeloid cells. It can be activated in tissue culture cells by many cytokines.

[1166] The STATs are activated to translocate from the cytoplasm to the nucleus upon tyrosine phosphorylation by a set of kinases known as the Janus Kinase (“Jaks”) family. Jaks represent a distinct family of soluble tyrosine kinases and include Tyk2, Jak1, Jak2, and Jak3. These kinases display significant sequence similarity and are generally catalytically inactive in resting cells.

[1167] The Jaks are activated by a wide range of receptors summarized in the Table below. (Adapted from review by Schidler and Darnell, Ann. Rev. Biochem. 64:621-51 (1995)). A cytokine receptor family, capable of activating Jaks, is divided into two groups: (a) Class I includes receptors for IL-2, IL-3, IL-4, IL-6, IL-7, IL-9, IL-11, IL-12, IL-15, Epo, PRL, GH, G-CSF, GM-CSF, LIF, CNTF, and thrombopoietin; and (b) Class 2 includes IFN-a, IFN-g, and IL-10. The Class 1 receptors share a conserved cysteine motif (a set of four conserved cysteines and one tryptophan) and a WSXWS motif (a membrane proximal region encoding Trp-Ser-Xaa-Trp-Ser (SEQ ID NO: 2)).

[1168] Thus, on binding of a ligand to a receptor, Jaks are activated, which in turn activate STATs, which then translocate and bind to GAS elements. This entire process is encompassed in the Jaks-STATs signal transduction pathway. Therefore, activation of the Jaks-STATs pathway, reflected by the binding of the GAS or the ISRE element, can be used to indicate proteins involved in the proliferation and differentiation of cells. For example, growth factors and cytokines are known to activate the Jaks-STATs pathway (See Table below). Thus, by using GAS elements linked to reporter molecules, activators of the Jaks-STATs pathway can be identified.

| | | JAKs | | | | |
|---|---|---|---|---|---|---|
| Ligand | tyk2 | Jak1 | Jak2 | Jak3 | STATS | GAS (elements) or ISRE |
| IFN family | | | | | | |
| IFN-a/B | + | + | − | − | 1, 2, 3 | ISRE |
| IFN-g | | + | + | − | 1 | GAS (IRF1 > Lys6 > IFP) |
| Il-10 | + | ? | ? | − | 1, 3 | |
| gp130 family | | | | | | |
| IL-6 (Pleiotropic) | + | + | + | ? | 1, 3 | GAS (IRF1 > Lys6 > IFP) |
| Il-11 (Pleiotropic) | ? | + | ? | ? | 1, 3 | |
| OnM (Pleiotropic) | ? | + | + | ? | 1, 3 | |
| LIF (Pleiotropic) | ? | + | + | ? | 1, 3 | |
| CNTF (Pleiotropic) | −/+ | + | + | + | 1, 3 | |
| G-CSF (Pleiotropic) | ? | + | ? | ? | 1, 3 | |
| IL-12 (Pleiotropic) | + | − | + | + | 1, 3 | |
| g-C family | | | | | | |
| IL-2 (lymphocytes) | − | + | − | + | 1, 3, 5 | GAS |
| IL-4 (lymph/myeloid) | − | + | − | + | 6 | GAS (IRF1 = IFP >> Ly6)(IgH) |
| IL-7 (lymphocytes) | − | + | − | + | 5 | GAS |
| IL-9 (lymphocytes) | − | + | − | + | 5 | GAS |
| IL-13 (lymphocyte) | − | + | ? | ? | 6 | GAS |
| IL-15 | ? | + | ? | + | 5 | GAS |
| gp140 family | | | | | | |
| IL-3 (myeloid) | − | − | + | − | 5 | GAS (IRF1 > IFP >> Ly6) |
| IL-5 (myeloid) | − | − | + | − | 5 | GAS |
| GM-CSF (myeloid) | − | − | + | − | 5 | GAS |
| Growth hormone family | | | | | | |
| GH | ? | − | + | − | 5 | |
| PRL | ? | +/− | + | − | 1, 3, 5 | |
| EPO | ? | − | + | − | 5 | GAS (B-CAS > IRF1 = IFP >> Ly6) |
| Receptor Tyrosine Kinases | | | | | | |
| EGF | ? | + | + | − | 1, 3 | GAS(IRF1) |
| PDGF | ? | + | + | − | 1, 3 | |
| CSF-1 | ? | + | + | − | 1, 3 | GAS (not IRF1) |

[1169] To construct a synthetic GAS containing promoter element, which is used in the Biological Assays described in Examples 32-33, a PCR based strategy is employed to generate a GAS-SV40 promoter sequence. The 5′ primer contains four tandem copies of the GAS binding site found in the IRFI promoter and previously demonstrated to bind STATs upon induction with a range of cytokines (Rothman et al., Immunity 1:457-468 (1994).), although other GAS or ISRE elements can be used instead. The 5′ primer also contains 18 bp of sequence complementary to the SV40 early promoter sequence and is flanked with an XhoI site. The sequence of the 5′ primer is:

(SEQ ID NO: 3)

5′:GCGCCTCGAGATTTCCCCGAAATCTAGATTTCCCCGAAATGATTTCC
CCGAAATGATTTCCCCGAAATATCTGCCATCTCAATTAG:3′

[1170] The downstream primer is complementary to the SV40 promoter and is flanked with a Hind III site: 5′:GCGGCAAGCTTTTTGCAAAGCCTAGGC:3′ (SEQ ID NO: 4)

[1171] PCR amplification is performed using the SV40 promoter template present in the B-gal:promoter plasmid obtained from Clontech. The resulting PCR fragment is digested with XhoI/Hind III and subcloned into BLSK2-. (Stratagene.) Sequencing with forward and reverse primers confirms that the insert contains the following sequence:

(SEQ ID NO: 5)

5′:CTCGAGATTTCCCCGAAATCTAGATTTCCCCGAAATGATTTCCCCGA
AATGATTTCCCCGAAATATCTGCCATCTCAATTAGTCAGCAACCATAGTC
CCGCCCCTAACTCCGCCCATCCCGCCCCTAACTCCGCCCAGTTCCGCCCA
TTCTCCGCCCCATGGCTGACTAATTTTTTTTATTTATGCAGAGGCCGAGG
CCGCCTCGGCCTCTGAGCTATTCCAGAAGTAGTGAGGAGGCTTTTTTGGA
GGCCTAGGCTTTTGCAAAAAGCTT:3′

[1172] With this GAS promoter element linked to the SV40 promoter, a GAS:SEAP2 reporter construct is next engineered. Here, the reporter molecule is a secreted alkaline phosphatase, or “SEAP.” Clearly, however, any reporter molecule can be instead of SEAP, in this or in any of the other Examples. Well known reporter molecules that can be used instead of SEAP include chloramphenicol acetyltransferase (CAT), luciferase, alkaline phosphatase, B-galactosidase, green fluorescent protein (GFP), or any protein detectable by an antibody.

[1173] The above sequence confirmed synthetic GAS-SV40 promoter element is subcloned into the pSEAP-Promoter vector obtained from Clontech using HindIII and XhoI, effectively replacing the SV40 promoter with the amplified GAS:SV40 promoter element, to create the GAS-SEAP vector. However, this vector does not contain a neomycin resistance gene, and therefore, is not preferred for mammalian expression systems.

[1174] Thus, in order to generate mammalian stable cell lines expressing the GAS-SEAP reporter, the GAS-SEAP cassette is removed from the GAS-SEAP vector using SalI and NotI, and inserted into a backbone vector containing the neomycin resistance gene, such as pGFP-1 (Clontech), using these restriction sites in the multiple cloning site, to create the GAS-SEAP/Neo vector. Once this vector is transfected into mammalian cells, this vector can then be used as a reporter molecule for GAS binding as described in Examples 32-33.

[1175] Other constructs can be made using the above description and replacing GAS with a different promoter sequence. For example, construction of reporter molecules containing EGR and NF-KB promoter sequences are described in Examples 34 and 35. However, many other promoters can be substituted using the protocols described in these Examples. For instance, SRE, IL-2, NFAT, or Osteocalcin promoters can be substituted, alone or in combination (e.g., GAS/NF-KB/EGR, GAS/NF-KB, Il-2/NFAT, or NF-KB/GAS). Similarly, other cell lines can be used to test reporter construct activity, such as HELA (epithelial), HUVEC (endothelial), Reh (B-cell), Saos-2 (osteoblast), HUVAC (aortic), or Cardiomyocyte.

### Example 32

### High-Throughput Screening Assay for T-cell Activity

[1176] The following protocol is used to assess T-cell activity by identifying factors, and determining whether sup emate containing a polypeptide of the invention proliferates and/or differentiates T-cells. T-cell activity is assessed using the GAS/SEAP/Neo construct produced in Example 31. Thus, factors that increase SEAP activity indicate the ability to activate the Jaks-STATS signal transduction pathway. The T-cell used in this assay is Jurkat T-cells (ATCC Accession No. TIB-152), although Molt-3 cells (ATCC Accession No. CRL-1552) and Molt-4 cells (ATCC Accession No. CRL-1582) cells can also be used.

[1177] Jurkat T-cells are lymphoblastic CD4+ Th1 helper cells. In order to generate stable cell lines, approximately 2 million Jurkat cells are transfected with the GAS-SEAP/neo vector using DMRIE-C (Life Technologies)(transfection procedure described below). The transfected cells are seeded to a density of approximately 20,000 cells per well and transfectants resistant to 1 mg/ml genticin selected. Resistant colonies are expanded and then tested for their response to increasing concentrations of interferon gamma. The dose response of a selected clone is demonstrated.

[1178] Specifically, the following protocol will yield sufficient cells for 75 wells containing 200 ul of cells. Thus, it is either scaled up, or performed in multiple to generate sufficient cells for multiple 96 well plates. Jurkat cells are maintained in RPMI+10% serum with 1%Pen-Strep. Combine 2.5 mls of OPTI-MEM (Life Technologies) with 10 ug of plasmid DNA in a T25 flask. Add 2.5 ml OPTI-MEM containing 50 ul of DMRIE-C and incubate at room temperature for 15-45 mins.

[1179] During the incubation period, count cell concentration, spin down the required number of cells (10⁷ per transfection), and resuspend in OPTI-MEM to a final concentration of 10⁷ cells/ml. Then add 1 ml of 1×10⁷ cells in OPTI-MEM to T25 flask and incubate at 37 degree C. for 6 hrs. After the incubation, add 10 ml of RPMI+15% serum.

[1180] The Jurkat:GAS-SEAP stable reporter lines are maintained in RPMI+10% serum, 1 mg/ml Genticin, and 1% Pen-Strep. These cells are treated with supernatants containing polypeptide of the present invention or polypeptide of the present invention induced polypeptides as produced by the protocol described in Example 30.

[1181] On the day of treatment with the supernatant, the cells should be washed and resuspended in fresh RPMI+10% serum to a density of 500,000 cells per ml. The exact number of cells required will depend on the number of supernatants being screened. For one 96 well plate, approximately 10 million cells (for 10 plates, 100 million cells) are required.

[1182] Transfer the cells to a triangular reservoir boat, in order to dispense the cells into a 96 well dish, using a 12 channel pipette. Using a 12 channel pipette, transfer 200 ul of cells into each well (therefore adding 100, 000 cells per well).

[1183] After all the plates have been seeded, 50 ul of the supernatants are transferred directly from the 96 well plate containing the supernatants into each well using a 12 channel pipette. In addition, a dose of exogenous interferon gamma (0.1, 1.0, 10 ng) is added to wells H9, H10, and H11 to serve as additional positive controls for the assay.

[1184] The 96 well dishes containing Jurkat cells treated with supernatants are placed in an incubator for 48 hrs (note: this time is variable between 48-72 hrs). 35 ul samples from each well are then transferred to an opaque 96 well plate using a 12 channel pipette. The opaque plates should be covered (using sellophene covers) and stored at −20 degree C. until SEAP assays are performed according to Example 36. The plates containing the remaining treated cells are placed at 4 degree C. and serve as a source of material for repeating the assay on a specific well if desired.

[1185] As a positive control, 100 Unit/ml interferon gamma can be used which is known to activate Jurkat T cells. Over 30 fold induction is typically observed in the positive control wells.

[1186] The above protocol may be used in the generation of both transient, as well as, stable transfected cells, which would be apparent to those of skill in the art.

### Example 33

### High-Throughput Screening Assay Identifying Myeloid Activity

[1187] The following protocol is used to assess myeloid activity of polypeptide of the present invention by determining whether polypeptide of the present invention proliferates and/or differentiates myeloid cells. Myeloid cell activity is assessed using the GAS/SEAPINeo construct produced in Example 31. Thus, factors that increase SEAP activity indicate the ability to activate the Jaks-STATS signal transduction pathway. The myeloid cell used in this assay is U937, a pre-monocyte cell line, although TF-1, HL60, or KG1 can be used.

[1188] To transiently transfect U937 cells with the GAS/SEAP/Neo construct produced in Example 31, a DEAE-Dextran method (Kharbanda et. al., 1994, Cell Growth & Differentiation, 5:259-265) is used. First, harvest 2×10⁷ U937 cells and wash with PBS. The U937 cells are usually grown in RPMI 1640 medium containing 10% heat-inactivated fetal bovine serum (FBS) supplemented with 100 units/ml penicillin and 100 mg/ml streptomycin.

[1189] Next, suspend the cells in 1 ml of 20 mM Tris-HCl (pH 7.4) buffer containing 0.5 mg/ml DEAE-Dextran, 8 ug GAS-SEAP2 plasmid DNA, 140 mM NaCl, 5 mM KCl, 375 uM Na₂HPO₄.7H₂O, 1 mM MgCl₂, and 675 uM CaCl₂. Incubate at 37 degrees C. for 45 min.

[1190] Wash the cells with RPMI 1640 medium containing 10% FBS and then resuspend in 10 ml complete medium and incubate at 37 degree C. for 36 hr.

[1191] The GAS-SEAP/U937 stable cells are obtained by growing the cells in 400 ug/ml G418. The G418-free medium is used for routine growth but every one to two months, the cells should be re-grown in 400 ug/ml G418 for couple of passages.

[1192] These cells are tested by harvesting 1×10⁸ cells (this is enough for ten 96-well plates assay) and wash with PBS. Suspend the cells in 200 ml above described growth medium, with a final density of 5×10⁵ cells/ml. Plate 200 ul cells per well in the 96-well plate (or 1×00⁵ cells/well).

[1193] Add 50 ul of the supernatant prepared by the protocol described in Example 30. Incubate at 37 degee C for 48 to 72 hr. As a positive control, 100 Unit/ml interferon gamma can be used which is known to activate U937 cells. Over 30 fold induction is typically observed in the positive control wells. SEAP assay the supernatant according to the protocol described in Example 36.

### Example 34

### High-Throughput Screening Assay Identifying Neuronal Activity

[1194] When cells undergo differentiation and proliferation, a group of genes are activated through many different signal transduction pathways. One of these genes, EGR1 (early growth response gene 1), is induced in various tissues and cell types upon activation. The promoter of EGR1 is responsible for such induction. Using the EGR1 promoter linked to reporter molecules, activation of cells can be assessed by polypeptide of the present invention.

[1195] Particularly, the following protocol is used to assess neuronal activity in PC12 cell lines. PC12 cells (rat phenochromocytoma cells) are known to proliferate and/or differentiate by activation with a number of mitogens, such as TPA (tetradecanoyl phorbol acetate), NGF (nerve growth factor), and EGF (epidermal growth factor). The EGR1 gene expression is activated during this treatment. Thus, by stably transfecting PC12 cells with a construct containing an EGR promoter linked to SEAP reporter, activation of PC12 cells by polypeptide of the present invention can be assessed.

[1196] The EGR/SEAP reporter construct can be assembled by the following protocol. The EGR-1 promoter sequence (−633 to +1)(Sakamoto K et al., Oncogene 6:867-871 (1991)) can be PCR amplified from human genomic DNA using the following primers:

(SEQ ID NO: 6)

5′ GCGCTCGAGGGATGACAGCGATAGAACCCCGG-3′

(SEQ ID NO: 7)

5′ GCGAAGCTTCGCGACTCCCCGGATCCGCCTC-3′

[1197] Using the GAS:SEAP/Neo vector produced in Example 31, EGR1 amplified product can then be inserted into this vector. Linearize the GAS:SEAP/Neo vector using restriction enzymes XhoI/HindIII, removing the GAS/SV40 stuffer. Restrict the EGR1 amplified product with these same enzymes. Ligate the vector and the EGR1 promoter.

[1198] To prepare 96 well-plates for cell culture, two mls of a coating solution (1:30 dilution of collagen type I (Upstate Biotech Inc. Cat#08-115) in 30% ethanol (filter sterilized)) is added per one 10 cm plate or 50 ml per well of the 96-well plate, and allowed to air dry for 2 hr.

[1199] PC12 cells are routinely grown in RPMI-1640 medium (Bio Whittaker) containing 10% horse serum (JRH BIOSCIENCES, Cat. # 12449-78P), 5% heat-inactivated fetal bovine serum (FBS) supplemented with 100 units/ml penicillin and 100 ug/ml streptomycin on a precoated 10 cm tissue culture dish. One to four split is done every three to four days. Cells are removed from the plates by scraping and resuspended with pipetting up and down for more than 15 times.

[1200] Transfect the EGR/SEAP/Neo construct into PCl₂ using the Lipofectamine protocol described in Example 30. EGR-SEAP/PC12 stable cells are obtained by growing the cells in 300 ug/ml G418. The G418-free medium is used for routine growth but every one to two months, the cells should be re-grown in 300 ug/ml G418 for couple of passages.

[1201] To assay for neuronal activity, a 10 cm plate with cells around 70 to 80% confluent is screened by removing the old medium. Wash the cells once with PBS (Phosphate buffered saline). Then starve the cells in low serum medium (RPMI-1640 containing 1% horse serum and 0.5% FBS with antibiotics) overnight.

[1202] The next morning, remove the medium and wash the cells with PBS. Scrape off the cells from the plate, suspend the cells well in 2 ml low serum medium. Count the cell number and add more low serum medium to reach final cell density as 5×10⁵ cells/ml.

[1203] Add 200 ul of the cell suspension to each well of 96-well plate (equivalent to 1×10⁵ cells/well). Add 50 ul supernatant produced by Example 30, 37 degree C. for 48 to 72 hr. As a positive control, a growth factor known to activate PC12 cells through EGR can be used, such as 50 ng/ul of Neuronal Growth Factor (NGF). Over fifty-fold induction of SEAP is typically seen in the positive control wells. SEAP assay the supernatant according to Example 36.

### Example 35

### High-Throughput Screening Assay for T-cell Activity

[1204] NF-KB (Nuclear Factor KB) is a transcription factor activated by a wide variety of agents including the inflammatory cytokines IL-1 and TNF, CD30 and CD40, lymphotoxin-alpha and lymphotoxin-beta, by exposure to LPS or thrombin, and by expression of certain viral gene products. As a transcription factor, NF-KB regulates the expression of genes involved in immune cell activation, control of apoptosis (NF-KB appears to shield cells from apoptosis), B and T-cell development, anti-viral and antimicrobial responses, and multiple stress responses.

[1205] In non-stimulated conditions, NF-KB is retained in the cytoplasm with I-KB (Inhibitor KB). However, upon stimulation, I-KB is phosphorylated and degraded, causing NF-KB to shuttle to the nucleus, thereby activating transcription of target genes. Target genes activated by NF-KB include IL-2, IL-6, GM-CSF, ICAM-1 and class I MHC.

[1206] Due to its central role and ability to respond to a range of stimuli, reporter constructs utilizing the NF-KB promoter element are used to screen the supernatants produced in Example 30. Activators or inhibitors of NF-KB would be useful in treating, preventing, and/or diagnosing diseases. For example, inhibitors of NF-KB could be used to treat those diseases related to the acute or chronic activation of NF-KB, such as rheumatoid arthritis.

[1207] To construct a vector containing the NF-KB promoter element, a PCR based strategy is employed. The upstream primer contains four tandem copies of the NF-KB binding site (GGGGACTTTCCC) (SEQ ID NO: 8), 18 bp of sequence complementary to the 5′ end of the SV40 early promoter sequence, and is flanked with an XhoI site:

(SEQ ID NO: 9)

5′:GCGGCCTCGAGGGGACTTTCCCGGGGACTTTCCGGGGACTTTCCGGG
ACTTTCCATCCTGCCATCTCAATTAG:3′

[1208] The downstream primer is complementary to the 3′ end of the SV40 promoter and is flanked with a Hind III site: 5′:GCGGCAAGCTTTTTGCAAAGCCTAGGC:3′(SEQ ID NO: 4)

[1209] PCR amplification is performed using the SV40 promoter template present in the pB-gal:promoter plasmid obtained from Clontech. The resulting PCR fragment is digested with XhoI and Hind III and subcloned into BLSK2-. (Stratagene) Sequencing with the T7 and T3 primers confirms the insert contains the following sequence:

(SEQ ID NO: 10)

5′:CTCGAGGGGACTTTCCCGGGGACTTTCCGGGGACTTTCCGGGACTTT
CCATCTGCCATCTCAATTAGTCAGCAACCATAGTCCCGCCCCTAACTCCG
CCCATCCCGCCCCTAACTCCGCCCAGTTCCGCCCATTCTCCGCCCCATGG
CTGACTAATTTTTTTTATTTATGCAGAGGCCGAGGCCGCCTCGGCCTCTG
AGCTATTCCAGAAGTAGTGAGGAGGCTTTTTTGGAGGCCTAGGCTTTTGC
AAAAAGCTT:3′

[1210] Next, replace the SV40 minimal promoter element present in the pSEAP2-promoter plasmid (Clontech) with this NF-KB/SV40 fragment using XhoI and HindIII. However, this vector does not contain a neomycin resistance gene, and therefore, is not preferred for mammalian expression systems.

[1211] In order to generate stable mammalian cell lines, the NF-KB/SV40/SEAP cassette is removed from the above NF-KB/SEAP vector using restriction enzymes SalI and NotI, and inserted into a vector containing neomycin resistance. Particularly, the NF-KB/SV40/SEAP cassette was inserted into pGFP-1 (Clontech), replacing the GFP gene, after restricting pGFP-1 with SalI and NotI.

[1212] Once NF-KB/SV40/SEAP/Neo vector is created, stable Jurkat T-cells are created and maintained according to the protocol described in Example 32. Similarly, the method for assaying supernatants with these stable Jurkat T-cells is also described in Example 32. As a positive control, exogenous TNF alpha (0.1,1, 10 ng) is added to wells H9, H10, and H11, with a 5-10 fold activation typically observed.

### Example 36

### Assay for SEAP Activity

[1213] As a reporter molecule for the assays described in Examples 32-35, SEAP activity is assayed using the Tropix Phospho-light Kit (Cat. BP-400) according to the following general procedure. The Tropix Phospho-light Kit supplies the Dilution, Assay, and Reaction Buffers used below.

[1214] Prime a dispenser with the 2.5× Dilution Buffer and dispense 15 ul of 2.5× dilution buffer into Optiplates containing 35 ul of a supernatant. Seal the plates with a plastic sealer and incubate at 65 degree C. for 30 min. Separate the Optiplates to avoid uneven heating.

[1215] Cool the samples to room temperature for 15 minutes. Empty the dispenser and prime with the Assay Buffer. Add 50 ml Assay Buffer and incubate at room temperature 5 min. Empty the dispenser and prime with the Reaction Buffer (see the Table below). Add 50 ul Reaction Buffer and incubate at room temperature for 20 minutes. Since the intensity of the chemiluminescent signal is time dependent, and it takes about 10 minutes to read 5 plates on a luminometer, thus one should treat 5 plates at each time and start the second set 10 minutes later.

[1216] Read the relative light unit in the luminometer. Set H12 as blank, and print the results. An increase in chemiluminescence indicates reporter activity.

Reaction Buffer Formulation:

| # of plates | Rxn buffer diluent (ml) | CSPD (ml) |
|---|---|---|
| 10 | 60 | 3 |
| 11 | 65 | 3.25 |
| 12 | 70 | 3.5 |
| 13 | 75 | 3.75 |
| 14 | 80 | 4 |
| 15 | 85 | 4.25 |
| 16 | 90 | 4.5 |
| 17 | 95 | 4.75 |
| 18 | 100 | 5 |
| 19 | 105 | 5.25 |
| 20 | 110 | 5.5 |
| 21 | 115 | 5.75 |
| 22 | 120 | 6 |
| 23 | 125 | 6.25 |
| 24 | 130 | 6.5 |
| 25 | 135 | 6.75 |
| 26 | 140 | 7 |
| 27 | 145 | 7.25 |
| 28 | 150 | 7.5 |
| 29 | 155 | 7.75 |
| 30 | 160 | 8 |
| 31 | 165 | 8.25 |
| 32 | 170 | 8.5 |
| 33 | 175 | 8.75 |
| 34 | 180 | 9 |
| 35 | 185 | 9.25 |
| 36 | 190 | 9.5 |
| 37 | 195 | 9.75 |
| 38 | 200 | 10 |
| 39 | 205 | 10.25 |
| 40 | 210 | 10.5 |
| 41 | 215 | 10.75 |
| 42 | 220 | 11 |
| 43 | 225 | 11.25 |
| 44 | 230 | 11.5 |
| 45 | 235 | 11.75 |
| 46 | 240 | 12 |
| 47 | 245 | 12.25 |
| 48 | 250 | 12.5 |
| 49 | 255 | 12.75 |
| 50 | 260 | 13 |

### Example 37

### High-Throughput Screening Assay Identifying Changes in Small Molecule Concentration and Membrane Permeability

[1217] Binding of a ligand to a receptor is known to alter intracellular levels of small molecules, such as calcium, potassium, sodium, and pH, as well as alter membrane potential. These alterations can be measured in an assay to identify supernatants which bind to receptors of a particular cell. Although the following protocol describes an assay for calcium, this protocol can easily be modified to detect changes in potassium, sodium, pH, membrane potential, or any other small molecule which is detectable by a fluorescent probe.

[1218] The following assay uses Fluorometric Imaging Plate Reader (“FLIPR”) to measure changes in fluorescent molecules (Molecular Probes) that bind small molecules. Clearly, any fluorescent molecule detecting a small molecule can be used instead of the calcium fluorescent molecule, fluo-4 (Molecular Probes, Inc.; catalog no. F-14202), used here. RPTKs for which the corresponding ligand is unknown. Ligands for RPTKs include mainly secreted small proteins, but also membrane-bound and extracellular matrix proteins.

[1219] Activation of RPTK by ligands involves ligand-mediated receptor dimerization, resulting in transphosphorylation of the receptor subunits and activation of the cytoplasmic tyrosine kinases. The cytoplasmic tyrosine kinases include receptor associated tyrosine kinases of the src-family (e.g., src, yes, lck, lyn, fyn) and non-receptor linked and cytosolic protein tyrosine kinases, such as the Jak family, members of which mediate signal transduction triggered by the cytokine superfamily of receptors (e.g., the Interleukins, Interferons, GM-CSF, and Leptin).

[1220] Because of the wide range of known factors capable of stimulating tyrosine kinase activity, identifying whether polypeptide of the present invention or a molecule induced by polypeptide of the present invention is capable of activating tyrosine kinase signal transduction pathways is of interest. Therefore, the following protocol is designed to identify such molecules capable of activating the tyrosine kinase signal transduction pathways.

[1221] Seed target cells (e.g., primary keratinocytes) at a density of approximately 25,000 cells per well in a 96 well Loprodyne Silent Screen Plates purchased from Nalge Nunc (Naperville, Ill.). The plates are sterilized with two 30 minute rinses with 100% ethanol, rinsed with water and dried overnight. Some plates are coated for 2 hr with 100 ml of cell culture grade type I collagen (50 mg/ml), gelatin (2%) or polylysine (50 mg/ml), all of which can be purchased from Sigma Chemicals (St. Louis, Mo.) or 10% Matri gel purchased from Becton Dickinson (Bedford,Mass.), or calf serum, rinsed with PBS and stored at 4 degree C. Cell growth on these plates is assayed by seeding 5,000 cells/well in growth medium and indirect quantitation of cell number through use of alamarBlue as described by the manufacturer Alamar Biosciences, Inc. (Sacramento, Calif.) after 48 hr. Falcon plate covers #3071 from Becton Dickinson (Bedford,Mass.) are used to cover the Loprodyne Silent Screen Plates. Falcon Microtest III cell culture plates can also be used in some proliferation experiments.

[1222] To prepare extracts, A431 cells are seeded onto the nylon membranes of Loprodyne plates (20,000/200 ml/well) and cultured overnight in complete medium. Cells are quiesced by incubation in serum-free basal medium for 24 hr. After 5-20 minutes treatment with EGF (60 ng/ml) or 50 ul of the supernatant produced in Example 30, the medium was removed and 100 ml of extraction buffer ((20 mM HEPES pH 7.5, 0.15 M NaCl, 1% Triton X-100, 0.1% SDS, 2 mM Na3VO4, 2 mM Na4P2O7 and a cocktail of protease inhibitors (# 1836170) obtained from Boeheringer Mannheim (Indianapolis, Ind.)) is added to each well and the plate is shaken on a rotating shaker for 5 minutes at 4° C. The plate is then placed in a vacuum transfer manifold and the extract filtered through the 0.45 mm membrane bottoms of each well using house vacuum. Extracts are collected in a 96-well catch/assay plate in the bottom of the vacuum manifold and immediately placed on ice. To obtain extracts clarified by centrifugation, the content of each well, after detergent solubilization for 5 minutes, is removed and centrifuged for 15 minutes at 4 degree C. at 16,000×g.

[1223] Test the filtered extracts for levels of tyrosine kinase activity. Although many methods of detecting tyrosine kinase activity are known, one method is described here.

[1224] Generally, the tyrosine kinase activity of a supernatant is evaluated by determining its ability to phosphorylate a tyrosine residue on a specific substrate (a biotinylated peptide). Biotinylated peptides that can be used for this purpose include PSK1 (corresponding to amino acids 6-20 of the cell division kinase cdc2-p34) and PSK2 (corresponding to amino acids 1-17 of gastrin). Both peptides are substrates for a range of tyrosine kinases and are available from Boehringer Mannheim.

[1225] The tyrosine kinase reaction is set up by adding the following components in order. First, add 10 ul of 5 uM Biotinylated Peptide, then 10 ul ATP/Mg₂+(5 mM ATP/50 mM MgCl₂), then 10 ul of 5× Assay Buffer (40 mM imidazole hydrochloride, pH 7.3, 40 mM beta-glycerophosphate, 1 mM EGTA, 100 mM MgCl₂, 5 mM MnCl₂, 0.5 mg/ml BSA), then 5 ul of Sodium Vanadate(1 mM), and then 5 ul of water. Mix the components gently and preincubate the reaction mix at 30 degree C. for 2 min. Initial the reaction by adding 10 ul of the control enzyme or the filtered supernatant.

[1226] The tyrosine kinase assay reaction is then terminated by adding 10 ul of 120 mm EDTA and place the reactions on ice.

[1227] Tyrosine kinase activity is determined by transferring 50 ul aliquot of reaction mixture to a microtiter plate (MTP) module and incubating at 37 degree C. for 20 min. This allows the streptavidin coated 96 well plate to associate with the biotinylated peptide. Wash the MTP module with 300 ul/well of PBS four times. Next add 75 ul of anti-phospolyrosine antibody conjugated to horse radish peroxidase(anti-P-Tyr-POD(0.5u/ml)) to each well and incubate at 37 degree C. for one hour. Wash the well as above.

[1228] Next add 100 ul of peroxidase substrate solution (Boehringer Mannheim) and incubate at room temperature for at least 5 mins (up to 30 min). Measure the absorbance of the sample at 405 nm by using ELISA reader. The level of bound peroxidase activity is quantitated using an ELISA reader and reflects the level of tyrosine kinase activity.

### Example 39

### High-Throughput Screening Assay Identifying Phosphorylation Activity

[1229] As a potential alternative and/or complement to the assay of protein tyrosine kinase activity described in Example 38, an assay which detects activation (phosphorylation) of major intracellular signal transduction intermediates can also be used. For example, as described below one particular assay can detect tyrosine phosphorylation of the Erk-1 and Erk-2 kinases. However, phosphorylation of other molecules, such as Raf, JNK, p38 MAP, Map kinase kinase (MEK), MEK kinase, Src, Muscle specific kinase (MuSK), IRAK, Tec, and Janus, as well as any other phosphoserine, phosphotyrosine, or phosphothreonine molecule, can be detected by substituting these molecules for Erk-1 or Erk-2 in the following assay.

[1230] Specifically, assay plates are made by coating the wells of a 96-well ELISA plate with 0.1 ml of protein G (lug/ml) for 2 hr at room temp, (RT). The plates are then rinsed with PBS and blocked with 3% BSA/PBS for 1 hr at RT. The protein G plates are then treated with 2 commercial monoclonal antibodies (100 ng/well) against Erk-1 and Erk-2 (1 hr at RT) (Santa Cruz Biotechnology). (To detect other molecules, this step can easily be modified by substituting a monoclonal antibody detecting any of the above described molecules.) After 3-5 rinses with PBS, the plates are stored at 4 degree C. until use.

[1231] A431 cells are seeded at 20,000/well in a 96-well Loprodyne filterplate and cultured overnight in growth medium. The cells are then starved for 48 hr in basal medium (DMEM) and then treated with EGF (6 ng/well) or 50 ul of the supernatants obtained in Example 30 for 5-20 minutes. The cells are then solubilized and extracts filtered directly into the assay plate.

[1232] After incubation with the extract for 1 hr at RT, the wells are again rinsed. As a positive control, a commercial preparation of MAP kinase (10 ng/well) is used in place of A431 extract. Plates are then treated with a commercial polyclonal (rabbit) antibody (1 ug/ml) which specifically recognizes the phosphorylated epitope of the Erk-1 and Erk-2 kinases (1 hr at RT). This antibody is biotinylated by standard procedures. The bound polyclonal antibody is then quantitated by successive incubations with Europium-streptavidin and Europium fluorescence enhancing reagent in the Wallac DELFIA instrument (time-resolved fluorescence). An increased fluorescent signal over background indicates a phosphorylation by polypeptide of the present invention or a molecule induced by polypeptide of the present invention.

### Example 40

### Assay for the Stimulation of Bone Marrow CD34+ Cell Proliferation

[1233] This assay is based on the ability of human CD34+ to proliferate in the presence of hematopoietic growth factors and evaluates the ability of isolated polypeptides expressed in mammalian cells to stimulate proliferation of CD34+ cells.

[1234] It has been previously shown that most mature precursors will respond to only a single signal. More immature precursors require at least two signals to respond. Therefore, to test the effect of polypeptides on hematopoietic activity of a wide range of progenitor cells, the assay contains a given polypeptide in the presence or absence of other hematopoietic growth factors. Isolated cells are cultured for 5 days in the presence of Stem Cell Factor (SCF) in combination with tested sample. SCF alone has a very limited effect on the proliferation of bone marrow (BM) cells, acting in such conditions only as a “survival” factor. However, combined with any factor exhibiting stimulatory effect on these cells (e.g., IL-3), SCF will cause a synergistic effect. Therefore, if the tested polypeptide has a stimulatory effect on hematopoietic progenitors, such activity can be easily detected. Since normal BM cells have a low level of cycling cells, it is likely that any inhibitory effect of a given polypeptide, or agonists or antagonists thereof, might not be detected. Accordingly, assays for an inhibitory effect on progenitors is preferably tested in cells that are first subjected to in vitro stimulation with SCF+IL+3, and then contacted with the compound that is being evaluated for inhibition of such induced proliferation.

[1235] Briefly, CD34+ cells are isolated using methods known in the art. The cells are thawed and resuspended in medium (QBSF 60 serum-free medium with 1% L-glutamine (SOOml) Quality Biological, Inc., Gaithersburg, Md. Cat# 160-204-101). After several gentle centrifugation steps at 200×g, cells are allowed to rest for one hour. The cell count is adjusted to 2.5×10⁵ cells/ml. During this time, 100 μl of sterile water is added to the peripheral wells of a 96-well plate. The cytokines that can be tested with a given polypeptide in this assay is rhSCF (R&D Systems, Minneapolis, Minn., Cat# 255-SC) at 50 ng/ml alone and in combination with rhSCF and rhIL-3 (R&D Systems, Minneapolis, Minn., Cat# 203-ML) at 30 ng/ml. After one hour, 10 μl of prepared cytokines, 50 μl of the supernatants prepared in Example 30 (supernatants at 1:2 dilution=50 μl) and 20 μl of diluted cells are added to the media which is already present in the wells to allow for a final total volume of 100 μl. The plates are then placed in a 37° C./5% CO₂ incubator for five days.

[1236] Eighteen hours before the assay is harvested, 0.5 μCi/well of [3H] Thymidine is added in a 10 μl volume to each well to determine the proliferation rate. The experiment is terminated by harvesting the cells from each 96-well plate to a filtermat using the Tomtec Harvester 96. After harvesting, the filtermats are dried, trimmed and placed into OmniFilter assemblies consisting of one OmniFilter plate and one OmniFilter Tray. 60 μl Microscint is added to each well and the plate sealed with TopSeal-A press-on sealing film A bar code 15 sticker is affixed to the first plate for counting. The sealed plates are then loaded and the level of radioactivity determined via the Packard Top Count and the printed data collected for analysis. The level of radioactivity reflects the amount of cell proliferation.

[1237] The studies described in this example test the activity of a given polypeptide to stimulate bone marrow CD34+ cell proliferation. One skilled in the art could easily modify the exemplified studies to test the activity of polynucleotides (e.g., gene therapy), antibodies, agonists, and/or antagonists and fragments and variants thereof. As a nonlimiting example, potential antagonists tested in this assay would be expected to inhibit cell proliferation in the presence of cytokines and/or to increase the inhibition of cell proliferation in the presence of cytokines and a given polypeptide. In contrast, potential agonists tested in this assay would be expected to enhance cell proliferation and/or to decrease the inhibition of cell proliferation in the presence of cytokines and a given polypeptide.

[1238] The ability of a gene to stimulate the proliferation of bone marrow CD34+ cells indicates that polynucleotides and polypeptides corresponding to the gene are useful for the diagnosis and treatment of disorders affecting the immune system and hematopoiesis. Representative uses are described in the “Immune Activity” and “Infectious Disease” sections above, and elsewhere herein.

### Example 41

### Assay for Extracellular Matrix Enhanced Cell Response (EMECR)

[1239] The objective of the Extracellular Matrix Enhanced Cell Response (EMECR) assay is to identify gene products (e.g., isolated polypeptides) that act on the hematopoietic stem cells in the context of the extracellular matrix (ECM) induced signal.

[1240] Cells respond to the regulatory factors in the context of signal(s) received from the surrounding microenvironment. For example, fibroblasts, and endothelial and epithelial stem cells fail to replicate in the absence of signals from the ECM. Hematopoietic stem cells can undergo self-renewal in the bone marrow, but not in in vitro suspension culture. The ability of stem cells to undergo self-renewal in vitro is dependent upon their interaction with the stromal cells and the ECM protein fibronectin (fn). Adhesion of cells to fn is mediated by the α₅.β₁ and α₄.β₁ integrin receptors, which are expressed by human and mouse hematopoietic stem cells. The factor(s) which integrate with the ECM environment and are responsible for stimulating stem cell self-renewal havea not yet been identified. Discovery of such factors should be of great interest in gene therapy and bone marrow transplant applications

[1241] Briefly, polystyrene, non tissue culture treated, 96-well plates are coated with fn fragment at a coating concentration of 0.2 μg/cm². Mouse bone marrow cells are plated (1,000 cells/well) in 0.2 ml of serum-free medium. Cells cultured in the presence of IL-3 (5 ng/ml)+SCF (50 ng/ml) would serve as the positive control, conditions under which little self-renewal but pronounced differentiation of the stem cells is to be expected. Gene products of the invention (e.g., including, but not limited to, polynucleotides and polypeptides of the present invention, and supernatants produced in Example 30), are tested with appropriate negative controls in the presence and absence of SCF(5.0 ng/ml), where test factor supernatants represent 10% of the total assay volume. The plated cells are then allowed to grow by incubating in a low oxygen environment (5% CO₂, 7% O₂, and 88% N₂) tissue culture incubator for 7 days. The number of proliferating cells within the wells is then quantitated by measuring thymidine incorporation into cellular DNA. Verification of the positive hits in the assay will require phenotypic characterization of the cells, which can be accomplished by scaling up of the culture system and using appropriate antibody reagents against cell surface antigens and FACScan.

[1242] One skilled in the art could easily modify the exemplified studies to test the activity of polynucleotides (e.g., gene therapy), antibodies, agonists, and/or antagonists and fragments and variants thereof.

[1243] If a particular polypeptide of the present invention is found to be a stimulator of hematopoietic progenitors, polynucleotides and polypeptides corresponding to the gene encoding said polypeptide may be useful for the diagnosis and treatment of disorders affecting the immune system and hematopoiesis. Representative uses are described in the “Immune Activity” and “Infectious Disease” sections above, and elsewhere herein. The gene product may also be useful in the expansion of stem cells and committed progenitors of various blood lineages, and in the differentiation and/or proliferation of various cell types.

[1244] Additionally, the polynucleotides and/or polypeptides of the gene of interest and/or agonists and/or antagonists thereof, may also be employed to inhibit the proliferation and differentiation of hematopoietic cells and therefore may be employed to protect bone marrow stem cells from chemotherapeutic agents during chemotherapy. This antiproliferative effect may allow administration of higher doses of chemotherapeutic agents and, therefore, more effective chemotherapeutic treatment.

[1245] Moreover, polynucleotides and polypeptides corresponding to the gene of interest may also be useful for the treatment and diagnosis of hematopoietic related disorders such as, for example, anemia, pancytopenia, leukopenia, thrombocytopenia or leukemia since stromal cells are important in the production of cells of hematopoietic lineages. The uses include bone marrow cell ex-vivo culture, bone marrow transplantation, bone marrow reconstitution, radiotherapy or chemotherapy of neoplasia.

### Example 42

### Human Dermal Fibroblast and Aortic Smooth Muscle Cell Proliferation

[1246] The polypeptide of interest is added to cultures of normal human dermal fibroblasts (NHDF) and human aortic smooth muscle cells (AoSMC) and two co-assays are performed with each sample. The first assay examines the effect of the polypeptide of interest on the proliferation of normal human dermal fibroblasts (NHDF) or aortic smooth muscle cells (AoSMC). Aberrant growth of fibroblasts or smooth muscle cells is a part of several pathological processes, including fibrosis, and restenosis. The second assay examines IL6 production by both NHDF and SMC. IL6 production is an indication of functional activation. Activated cells will have increased production of a number of cytokines and other factors, which can result in a proinflammatory or immunomodulatory outcome. Assays are run with and without co-TNFa stimulation, in order to check for costimulatory or inhibitory activity.

[1247] Briefly, on day 1, 96-well black plates are set up with 1000 cells/well (NHDF) or 2000 cells/well (AOSMC) in 100 μl culture media. NHDF culture media contains: Clonetics FB basal media, 1 mg/ml hFGF, 5 mg/ml insulin, 50 mg/ml gentamycin, 2%FBS, while AoSMC culture media contains Clonetics SM basal media, 0.5 μg/ml HEGF, 5 mg/ml insulin, 1 μg/ml hFGF, 50 mg/ml gentamycin, 50 μg/ml Amphotericin B, 5%FBS. After incubation at 37° C. for at least 4-5 hours culture media is aspirated and replaced with growth arrest media. Growth arrest media for NHDF contains fibroblast basal media, 50 mg/ml gentamycin, 2% FBS, while growth arrest media for AoSMC contains SM basal media, 50 mg/ml gentamycin, 50 μg/ml Amphotericin B, 0.4% FBS. Incubate at 37° C. until day 2.

[1248] On day 2, serial dilutions and templates of the polypeptide of interest are designed such that they always include media controls and known-protein controls. For both stimulation and inhibition experiments, proteins are diluted in growth arrest media. For inhibition experiments, TNFa is added to a final concentration of 2 ng/ml (NHDF) or 5 ng/ml (AoSMC). Add ⅓ vol media containing controls or polypeptides of the present invention and incubate at 37 degrees C./5% CO₂ until day 5.

[1249] Transfer 60 μl from each well to another labeled 96-well plate, cover with a plate-sealer, and store at 4 degrees C. until Day 6 (for IL6 ELISA). To the remaining 100 μl in the cell culture plate, aseptically add Alamar Blue in an amount equal to 10% of the culture volume (10 μl). Return plates to incubator for 3 to 4 hours. Then measure fluorescence with excitation at 530 nm and emission at 590 nm using the CytoFluor. This yields the growth stimulation/inhibition data.

[1250] On day 5, the IL6 ELISA is performed by coating a 96 well plate with 50-100 ul/well of Anti-Human IL6 Monoclonal antibody diluted in PBS, pH 7.4, incubate ON at room temperature.

[1251] On day 6, empty the plates into the sink and blot on paper towels. Prepare Assay Buffer containing PBS with 4% BSA. Block the plates with 200 μl/well of Pierce Super Block blocking buffer in PBS for 1-2 hr and then wash plates with wash buffer (PBS, 0.05% Tween-20). Blot plates on paper towels. Then add 50 μl/well of diluted Anti-Human IL-6 Monoclonal, Biotin-labeled antibody at 0.50 mg/ml. Make dilutions of IL-6 stock in media (30, 10, 3, 1, 0.3, 0 ng/ml). Add duplicate samples to top row of plate. Cover the plates and incubate for 2 hours at RT on shaker.

[1252] Plates are washed with wash buffer and blotted on paper towels. Dilute EU-labeled Streptavidin 1:1000 in Assay buffer, and add 100 μl/well. Cover the plate and incubate 1 h at RT. Plates are again washed with wash buffer and blotted on paper towels.

[1253] Add 100 μl/well of Enhancement Solution. Shake for 5 minutes. Read the plate on the Wallac DELFIA Fluorometer. Readings from triplicate samples in each assay were tabulated and averaged.

[1254] A positive result in this assay suggests AoSMC cell proliferation and that the polypeptide of the present invention may be involved in dermal fibroblast proliferation and/or smooth muscle cell proliferation. A positive result also suggests many potential uses of polypeptides, polynucleotides, agonists and/or antagonists of the polynucleotide/polypeptide of the present invention which gives a positive result. For example, inflammation and immune responses, wound healing, and angiogenesis, as detailed throughout this specification. Particularly, polypeptides of the present invention and polynucleotides of the present invention may be used in wound healing and dermal regeneration, as well as the promotion of vasculogenesis, both of the blood vessels and lymphatics. The growth of vessels can be used in the treatment of, for example, cardiovascular diseases. Additionally, antagonists of polypeptides and polynucleotides of the invention may be useful in treating diseases, disorders, and/or conditions which involve angiogenesis by acting as an anti-vascular agent (e.g., anti-angiogenesis). These diseases, disorders, and/or conditions are known in the art and/or are described herein, such as, for example, malignancies, solid tumors, benign tumors, for example hemangiomas, acoustic neuromas, neurofibromas, trachomas, and pyogenic granulomas; artheroscleric plaques; ocular angiogenic diseases, for example, diabetic retinopathy, retinopathy of prematurity, macular degeneration, corneal graft rejection, neovascular glaucoma, retrolental fibroplasia, rubeosis, retinoblastoma, uvietis and Pterygia (abnormal blood vessel growth) of the eye; rheumatoid arthritis; psoriasis; delayed wound healing; endometriosis; vasculogenesis; granulations; hypertrophic scars (keloids); nonunion fractures; scleroderma; trachoma; vascular adhesions; myocardial angiogenesis; coronary collaterals; cerebral collaterals; arterioyenous malformations; ischemic limb angiogenesis; Osler-Webber Syndrome; plaque neovascularization; telangiectasia; hemophiliac joints; angiofibroma; fibromuscular dysplasia; wound granulation; Crohn's disease; and atherosclerosis. Moreover, antagonists of polypeptides and polynucleotides of the invention may be useful in treating anti-hyperproliferative diseases and/or anti-inflammatory known in the art and/or described herein.

[1255] One skilled in the art could easily modify the exemplified studies to test the activity of polynucleotides (e.g., gene therapy), antibodies, agonists, and/or antagonists and fragments and variants thereof.

### Example 43

### Cellular Adhesion Molecule (CAM) Expression on Endothelial Cells

[1256] The recruitment of lymphocytes to areas of inflammation and angiogenesis involves specific receptor-ligand interactions between cell surface adhesion molecules (CAMs) on lymphocytes and the vascular endothelium. The adhesion process, in both normal and pathological settings, follows a multi-step cascade that involves intercellular adhesion molecule-1 (ICAM-1), vascular cell adhesion molecule-1 (VCAM-1), and endothelial leukocyte adhesion molecule-1 (E-selectin) expression on endothelial cells (EC). The expression of these molecules and others on the vascular endothelium determines the efficiency with which leukocytes may adhere to the local vasculature and extravasate into the local tissue during the development of an inflammatory response. The local concentration of cytokines and growth factor participate in the modulation of the expression of these CAMs.

[1257] Briefly, endothelial cells (e.g., Human Umbilical Vein Endothelial cells (HUVECs)) are grown in a standard 96 well plate to confluence, growth medium is removed from the cells and replaced with 100 μl of 199 Medium (10% fetal bovine serum (FBS)). Samples for testing and positive or negative controls are added to the plate in triplicate (in 10 μl volumes). Plates are then incubated at 37° C. for either 5 h (selectin and integrin expression) or 24 h (integrin expression only). Plates are aspirated to remove medium and 100 μl of 0.1% paraformaldehyde-PBS(with Ca++ and Mg++) is added to each well. Plates are held at 4° C. for 30 min. Fixative is removed from the wells and wells are washed 1× with PBS(+Ca,Mg)+0.5% BSA and drained. 10 μl of diluted primary antibody is added to the test and control wells. Anti-ICAM-1-Biotin, Anti-VCAM-1-Biotin and Anti-E-selectin-Biotin are used at a concentration of 10 μg/ml (1:10 dilution of 0.1 mg/ml stock antibody). Cells are incubated at 37° C. for 30 min. in a humidified environment. Wells are washed three times with PBS(+Ca,Mg)+0.5% BSA. 20 μl of diluted ExtrAvidin-Alkaline Phosphatase (1:5,000 dilution, referred to herein as the working dilution) are added to each well and incubated at 37° C. for 30 min. Wells are washed three times with PBS(+Ca,Mg)+0.5% BSA. Dissolve 1 tablet of p-Nitrophenol Phosphate pNPP per 5 ml of glycine buffer (pH 10.4). 100 Ill of pNPP substrate in glycine buffer is added to each test well. Standard wells in triplicate are prepared from the working dilution of the ExtrAvidin-Alkaline Phosphotase in glycine buffer: 1:5,000 (10⁰)>10^{-0.5}>10⁻¹>10^{-1.5}. 5 μl of each dilution is added to triplicate wells and the resulting AP content in each well is 5.50 ng, 1.74 ng, 0.55 ng, 0.18 ng. 100 μl of pNNP reagent is then added to each of the standard wells. The plate is incubated at 37° C. for 4 h. A volume of 50 ill of 3M NaOH is added to all wells. The plate is read on a plate reader at 405 nm using the background subtraction option on blank wells filled with glycine buffer only. Additionally, the template is set up to indicate the concentration of AP-conjugate in each standard well [5.50 ng; 1.74 ng; 0.55 ng; 0.18 ng]. Results are indicated as amount of bound AP-conjugate in each sample.

### Example 44

### Alamar Blue Endothelial Cells Proliferation Assay

[1258] This assay may be used to quantitatively determine protein mediated inhibition of bFGF-induced proliferation of Bovine Lymphatic Endothelial Cells (LECs), Bovine Aortic Endothelial Cells (BAECs) or Human Microvascular Uterine Myometrial Cells (UTMECs). This assay incorporates a fluorometric growth indicator based on detection of metabolic activity. A standard Alamar Blue Proliferation Assay is prepared in EGM-2MV with 10 ng/ml of bFGF added as a source of endothelial cell stimulation. This assay may be used with a variety of endothelial cells with slight changes in growth medium and cell concentration. Dilutions of the protein batches to be tested are diluted as appropriate. Serum-free medium (GIBCO SFM) without bFGF is used as a non-stimulated control and Angiostatin or TSP-1 are included as a known inhibitory controls.

[1259] Briefly, LEC, BAECs or UTMECs are seeded in growth media at a density of 5000 to 2000 cells/well in a 96 well plate and placed at 37 degreesC overnight. After the overnight incubation of the cells, the growth media is removed and replaced with GIBCO EC-SFM. The cells are treated with the appropriate dilutions of the protein of interest or control protein sample(s) (prepared in SFM) in triplicate wells with additional bFGF to a concentration of 10 ng/ml. Once the cells have been treated with the samples, the plate(s) is/are placed back in the 37° C. incubator for three days. After three days 10 ml of stock alamar blue (Biosource Cat# DALI 100) is added to each well and the plate(s) is/are placed back in the 37° C. incubator for four hours. The plate(s) are then read at 530 nm excitation and 590 nm emission using the CytoFluor fluorescence reader. Direct output is recorded in relative fluorescence units.

[1260] Alamar blue is an oxidation-reduction indicator that both fluoresces and changes color in response to chemical reduction of growth medium resulting from cell growth. As cells grow in culture, innate metabolic activity results in a chemical reduction of the immediate surrounding environment. Reduction related to growth causes the indicator to change from oxidized (non-fluorescent blue) form to reduced (fluorescent red) form (i.e., stimulated proliferation will produce a stronger signal and inhibited proliferation will produce a weaker signal and the total signal is proportional to the total number of cells as well as their metabolic activity). The background level of activity is observed with the starvation medium alone. This is compared to the output observed from the positive control samples (bFGF in growth medium) and protein dilutions.

### Example 45

### Detection of Inhibition of a Mixed Lymphocyte Reaction

[1261] This assay can be used to detect and evaluate inhibition of a Mixed Lymphocyte Reaction (MLR) by gene products (e.g., isolated polypeptides). Inhibition of a MLR may be due to a direct effect on cell proliferation and viability, modulation of costimulatory molecules on interacting cells, modulation of adhesiveness between lymphocytes and accessory cells, or modulation of cytokine production by accessory cells. Multiple cells may be targeted by these polypeptides since the peripheral blood mononuclear fraction used in this assay includes T, B and natural killer lymphocytes, as well as monocytes and dendritic cells.

[1262] Polypeptides of interest found to inhibit the MLR may find application in diseases associated with lymphocyte and monocyte activation or proliferation. These include, but are not limited to, diseases such as asthma, arthritis, diabetes, inflammatory skin conditions, psoriasis, eczema, systemic lupus erythematosus, multiple sclerosis, glomerulonephritis, inflammatory bowel disease, crohn's disease, ulcerative colitis, arteriosclerosis, cirrhosis, graft vs. host disease, host vs. graft disease, hepatitis, leukemia and lymphoma.

[1263] Briefly, PBMCs from human donors are purified by density gradient centrifugation using Lymphocyte Separation Medium (LSM®, density 1.0770 g/ml, Organon Teknika Corporation, West Chester, Pa.). PBMCs from two donors are adjusted to 2×10⁶ cells/ml in RPMI-1640 (Life Technologies, Grand Island, N.Y.) supplemented with 10% FCS and 2 mM glutamine. PBMCs from a third donor is adjusted to 2×10⁵ cells/ml. Fifty microliters of PBMCs from each donor is added to wells of a 96-well round bottom microtiter plate. Dilutions of test materials (50 μl) is added in triplicate to microtiter wells. Test samples (of the protein of interest) are added for final dilution of 1:4; rhuIL-2 (R&D Systems, Minneapolis, Minn., catalog number 202-IL) is added to a final concentration of 1 μg/ml; anti-CD4 mAb (R&D Systems, clone 34930.11, catalog number MAB379) is added to a final concentration of 10 μg/ml. Cells are cultured for 7-8 days at 37° C. in 5% CO₂, and 1 μC of [3H] thymidine is added to wells for the last 16 hrs of culture. Cells are harvested and thymidine incorporation determined using a Packard TopCount. Data is expressed as the mean and standard deviation of triplicate determinations.

[1264] Samples of the protein of interest are screened in separate experiments and compared to the negative control treatment, anti-CD4 mAb, which inhibits proliferation of lymphocytes and the positive control treatment, IL-2 (either as recombinant material or supernatant), which enhances proliferation of lymphocytes.

[1265] One skilled in the art could easily modify the exemplified studies to test the activity of polynucleotides (e.g., gene therapy), antibodies, agonists, and/or antagonists and fragments and variants thereof.

### Example 46

### Assays for Protease Activity

[1266] The following assay may be used to assess protease activity of the polypeptides of the invention.

[1267] Gelatin and casein zymography are performed essentially as described (Heusen et al., Anal. Biochem., 102:196-202 (1980); Wilson et al., Journal of Urology, 149:653-658 (1993)). Samples are run on 10% polyacryamide/0.1% SDS gels containing 1% gelain orcasein, soaked in 2.5% triton at room temperature for 1 hour, and in 0.1M glycine, pH 8.3 at 37° C. 5 to 16 hours. After staining in amido black areas of proteolysis apear as clear areas agains the blue-black background. Trypsin (Sigma T8642) is used as a positive control.

[1268] Protease activity is also determined by monitoring the cleavage of n-a-benzoyl-L-arginine ethyl ester (BAEE) (Sigma B-4500. Reactions are set up in (25 mMNaPO₄, 1 mM EDTA, and 1 mM BAEE), pH 7.5. Samples are added and the change in adsorbance at 260 nm is monitored on the Beckman DU-6 spectrophotometer in the time-drive mode. Trypsin is used as a positive control.

[1269] Additional assays based upon the release of acid-soluble peptides from casein or hemoglobin measured as adsorbance at 280 nm or calorimetrically using the Folin method are performed as described in Bergmeyer, et al., Methods of Enzymatic Analysis, 5 (1984). Other assays involve the solubilization of chromogenic substrates (Ward, Applied Science, 251-317 (1983)).

### Example 47

### Identifying Serine Protease Substrate Specificity

[1270] Methods known in the art or described herein may be used to determine the substrate specificity of the polypeptides of the present invention having serine protease activity. A preferred method of determining substrate specificity is by the use of positional scanning synthetic combinatorial libraries as described in GB 2 324 529 (incorporated herein in its entirety).

### Example 48

### Ligand Binding Assays

[1271] The following assay may be used to assess ligand binding activity of the polypeptides of the invention.

[1272] Ligand binding assays provide a direct method for ascertaining receptor pharmacology and are adaptable to a high throughput format. The purified ligand for a polypeptide is radiolabeled to high specific activity (50-2000 Ci/mmol) for binding studies. A determination is then made that the process of radiolabeling does not diminish the activity of the ligand towards its polypeptide. Assay conditions for buffers, ions, pH and other modulators such as nucleotides are optimized to establish a workable signal to noise ratio for both membrane and whole cell polypeptide sources. For these assays, specific polypeptide binding is defined as total associated radioactivity minus the radioactivity measured in the presence of an excess of unlabeled competing ligand. Where possible, more than one competing ligand is used to define residual nonspecific binding.

### Example 49

### Functional Assay in Xenopus Oocytes

[1273] Capped RNA transcripts from linearized plasmid templates encoding the polypeptides of the invention are synthesized in vitro with RNA polymerases in accordance with standard procedures. In vitro transcripts are suspended in water at a final concentration of 0.2 mg/ml. Ovarian lobes are removed from adult female toads, Stage V defolliculated oocytes are obtained, and RNA transcripts (10 ng/oocytc) are injected in a 50 nl bolus using a microinjection apparatus. Two electrode voltage clamps are used to measure the currents from individual Xenopus oocytes in response polypeptides and polypeptide agonist exposure. Recordings are made in Ca2+ free Barth's medium at room temperature. The Xenopus system can be used to screen known ligands and tissue/cell extracts for activating ligands.

### Example 50

### Microphysiometric Assays

[1274] Activation of a wide variety of secondary messenger systems results in extrusion of small amounts of acid from a cell. The acid formed is largely as a result of the increased metabolic activity required to fuel the intracellular signaling process. The pH changes in the media surrounding the cell are very small but are detectable by the CYTOSENSOR microphysiometer (Molecular Devices Ltd., Menlo Park, Calif). The CYTOSENSOR is thus capable of detecting the activation of polypeptide which is coupled to an energy utilizing intracellular signaling pathway.

### Example 51

### Extract/Cell Supernatant Screening

[1275] A large number of mammalian receptors exist for which there remains, as yet, no cognate activating ligand (agonist). Thus, active ligands for these receptors may not be included within the ligands banks as identified to date. Accordingly, the polypeptides of the invention can also be functionally screened (using calcium, cAMP, microphysiometer, oocyte electrophysiology, etc., functional screens) against tissue extracts to identify its natural ligands. Extracts that produce positive functional responses can be sequentially subfractionated until an activating ligand is isolated and identified.

### Example 52

### Calcium and cAMP Functional Assays

[1276] Seven transmembrane receptors which are expressed in HEK 293 cells have been shown to be coupled functionally to activation of PLC and calcium mobilization and/or cAMP stimulation or inhibition. Basal calcium levels in the HEK 293 cells in receptor-transfected or vector control cells were observed to be in the normal, 100 nM to 200 nM, range. HEK 293 cells expressing recombinant receptors are loaded with fura 2 and in a single day >150 selected ligands or tissue/cell extracts are evaluated for agonist induced calcium mobilization. Similarly, HEK 293 cells expressing recombinant receptors are evaluated for the stimulation or inhibition of cAMP production using standard cAMP quantitation assays. Agonists presenting a calcium transient or cAMP fluctuation are tested in vector control cells to determine if the response is unique to the transfected cells expressing receptor.

### Example 53

### ATP-Binding Assay

[1277] The following assay may be used to assess ATP-binding activity of polypeptides of the invention.

[1278] ATP-binding activity of the polypeptides of the invention may be detected using the ATP-binding assay described in U.S. Pat. No. 5,858,719, which is herein incorporated by reference in its entirety. Briefly, ATP-binding to polypeptides of the invention is measured via photoaffinity labeling with 8-azido-ATP in a competition assay. Reaction mixtures containing 1 mg/ml of the ABC transport protein of the present invention are incubated with varying concentrations of ATP, or the non-hydrolyzable ATP analog adenyl-5′-imidodiphosphate for 10 minutes at 4° C. A mixture of 8-azido-ATP (Sigma Chem. Corp., St. Louis, Mo.) plus 8-azido-ATP (³²P-ATP) (5 mCi/μmol, ICN, Irvine Calif.) is added to a final concentration of 100 μM and 0.5 ml aliquots are placed in the wells of a porcelain spot plate on ice. The plate is irradiated using a short wave 254 nm UV lamp at a distance of 2.5 cm from the plate for two one-minute intervals with a one-minute cooling interval in between. The reaction is stopped by addition of dithiothreitol to a final concentration of 2 mM. The incubations are subjected to SDS-PAGE electrophoresis, dried, and autoradiographed. Protein bands corresponding to the particular polypeptides of the invention are excised, and the radioactivity quantified. A decrease in radioactivity with increasing ATP or adenly-5′-imidodiphosphate provides a measure of ATP affinity to the polypeptides.

### Example 54

### Small Molecule Screening

[1279] This invention is particularly useful for screening therapeutic compounds by using the polypeptides of the invention, or binding fragments thereof, in any of a variety of drug screening techniques. The polypeptide or fragment employed in such a test may be affixed to a solid support, expressed on a cell surface, free in solution, or located intracellularly. One method of drug screening utilizes eukaryotic or prokaryotic host cells which are stably transformed with recombinant nucleic acids expressing the polypeptide or fragment. Drugs are screened against such transformed cells in competitive binding assays. One may measure, for example, the formulation of complexes between the agent being tested and polypeptide of the invention.

[1280] Thus, the present invention provides methods of screening for drugs or any other agents which affect activities mediated by the polypeptides of the invention. These methods comprise contacting such an agent with a polypeptide of the invention or fragment thereof and assaying for the presence of a complex between the agent and the polypeptide or fragment thereof, by methods well known in the art. In such a competitive binding assay, the agents to screen are typically labeled. Following incubation, free agent is separated from that present in bound form, and the amount of free or uncomplexed label is a measure of the ability of a particular agent to bind to the polypeptides of the invention.

[1281] Another technique for drug screening provides high throughput screening for compounds having suitable binding affinity to the polypeptides of the invention, and is described in great detail in European Patent Application 84/03564, published on Sep. 13, 1984, which is herein incorporated by reference in its entirety. Briefly stated, large numbers of different small molecule test compounds are synthesized on a solid substrate, such as plastic pins or some other surface. The test compounds are reacted with polypeptides of the invention and washed. Bound polypeptides are then detected by methods well known in the art. Purified polypeptides are coated directly onto plates for use in the aforementioned drug screening techniques. In addition, non-neutralizing antibodies may be used to capture the peptide and immobilize it on the solid support.

[1282] This invention also contemplates the use of competitive drug screening assays in which neutralizing antibodies capable of binding polypeptides of the invention specifically compete with a test compound for binding to the polypeptides or fragments thereof. In this manner, the antibodies are used to detect the presence of any peptide which shares one or more antigenic epitopes with a polypeptide of the invention.

### Example 55

### Phosphorylation Assay

[1283] In order to assay for phosphorylation activity of the polypeptides of the invention, a phosphorylation assay as described in U.S. Pat. No. 5,958,405 (which is herein incorporated by reference) is utilized. Briefly, phosphorylation activity may be measured by phosphorylation of a protein substrate using gamma-labeled ³²P-ATP and quantitation of the incorporated radioactivity using a gamma radioisotope counter. The polypeptides of the invention are incubated with the protein substrate, ³²P-ATP, and a kinase buffer. The ³²P incorporated into the substrate is then separated from free ³²P-ATP by electrophoresis, and the incorporated ³²P is counted and compared to a negative control. Radioactivity counts above the negative control are indicative of phosphorylation activity of the polypeptides of the invention.

### Example 56

### Detection of Phosphorylation Activity (Activation) of the Polypeptides of the Invention in the Presence of Polypeptide Ligands

[1284] Methods known in the art or described herein may be used to determine the phosphorylation activity of the polypeptides of the invention. A preferred method of determining phosphorylation activity is by the use of the tyrosine phosphorylation assay as described in U.S. Pat. No. 5,817,471 (incorporated herein by reference).

### Example 57

### Identification of Signal Transduction Proteins that Interact with Polypeptides of the Present Invention

[1285] The purified polypeptides of the invention are research tools for the identification, characterization and purification of additional signal transduction pathway proteins or receptor proteins. Briefly, labeled polypeptides of the invention are useful as reagents for the purification of molecules with which it interacts. In one embodiment of affinity purification, polypeptides of the invention are covalently coupled to a chromatography column. Cell-free extract derived from putative target cells, such as carcinoma tissues, is passed over the column, and molecules with appropriate affinity bind to the polypeptides of the invention. The protein complex is recovered from the column, dissociated, and the recovered molecule subjected to N-terminal protein sequencing. This amino acid sequence is then used to identify the captured molecule or to design degenerate oligonucleotide probes for cloning the relevant gene from an appropriate cDNA library.

### Example 58

### IL-6 Bioassay

[1286] To test the proliferative effects of the polypeptides of the invention, the IL-6 Bioassay as described by Marz et al. is utilized (Proc. Natl. Acad. Sci., U.S.A., 95:3251-56 (1998), which is herein incorporated by reference). Briefly, IL-6 dependent B9 murine cells are washed three times in IL-6 free medium and plated at a concentration of 5,000 cells per well in 50 μl, and 50 μl of the IL-6-like polypeptide is added. After 68 hrs. at 37° C., the number of viable cells is measured by adding the tetrazolium salt thiazolyl blue (MTT) and incubating for a further 4 hrs. at 37° C. B9 cells are lysed by SDS and optical density is measured at 570 nm. Controls containing IL-6 positive) and no cytokine (negative) are utilized. Enhanced proliferation in the test sample(s) relative to the negative control is indicative of proliferative effects mediated by polypeptides of the invention.

### Example 59

### Support of Chicken Embryo Neuron Survival

[1287] To test whether sympathetic neuronal cell viability is supported by polypeptides of the invention, the chicken embryo neuronal survival assay of Senaldi et al is utilized (Proc. Natl. Acad. Sci., U.S.A., 96:11458-63 (1998), which is herein incorporated by reference). Briefly, motor and sympathetic neurons are isolated from chicken embryos, resuspended in L15 medium (with 10% FCS, glucose, sodium selenite, progesterone, conalbumin, putrescine, and insulin; Life Technologies, Rockville, Md.) and Dulbecco's modified Eagles medium [with 10% FCS, glutamine, penicillin, and 25 mM Hepes buffer (pH 7.2); Life Technologies, Rockville, Md.], respectively, and incubated at 37° C. in 5% CO₂ in the presence of different concentrations of the purified IL-6-like polypeptide, as well as a negative control lacking any cytokine. After 3 days, neuron survival is determined by evaluation of cellular morphology, and through the use of the colorimetric assay of Mosmann (Mosmann, T., J. Immunol. Methods, 65:55-63 (1983)). Enhanced neuronal cell viability as compared to the controls lacking cytokine is indicative of the ability of the inventive purified IL-6-like polypeptide(s) to enhance the survival of neuronal cells.

### Example 60

### Assay for Phosphatase Activity

[1288] The following assay may be used to assess serine/threonine phosphatase (PTPase) activity of the polypeptides of the invention.

[1289] In order to assay for serine/threonine phosphatase (PTPase) activity, assays can be utilized which are widely known to those skilled in the art. For example, the serine/threonine phosphatase (PSPase) activity is measured using a PSPase assay kit from New England Biolabs, Inc. Myelin basic protein (MyBP), a substrate for PSPase, is phosphorylated on serine and threonine residues with cAMP-dependent Protein Kinase in the presence of [³²P]ATP. Protein serine/threonine phosphatase activity is then determined by measuring the release of inorganic phosphate from ³²P-labeled MyBP.

### Example 61

### Interaction of Serine/Threonine Phosphatases with other Proteins

[1290] The polypeptides of the invention with serine/threonine phosphatase activity as determined in Example 60 are research tools for the identification, characterization and purification of additional interacting proteins or receptor proteins, or other signal transduction pathway proteins. Briefly, labeled polypeptide(s) of the invention is useful as a reagent for the purification of molecules with which it interacts. In one embodiment of affinity purification, polypeptide of the invention is covalently coupled to a chromatography column. Cell-free extract derived from putative target cells, such as neural or liver cells, is passed over the column, and molecules with appropriate affinity bind to the polypeptides of the invention. The polypeptides of the invention-complex is recovered from the column, dissociated, and the recovered molecule subjected to N-terminal protein sequencing. This amino acid sequence is then used to identify the captured molecule or to design degenerate oligonucleotide probes for cloning the relevant gene from an appropriate cDNA library.

### Example 62

### Assaying for Heparanase Activity

[1291] In order to assay for heparanase activity of the polypeptides of the invention, the heparanase assay described by Vlodavsky et al is utilized (Vlodavsky, I., et al., Nat. Med., 5:793-802 (1999)). Briefly, cell lysates, conditioned media or intact cells (1×10⁶ cells per 35-mm dish) are incubated for 18 hrs at 37° C., pH 6.2-6.6, with ³⁵S-labeled ECM or soluble ECM derived peak I proteoglycans. The incubation medium is centrifuged and the supernatant is analyzed by gel filtration on a Sepharose CL-6B column (0.9×30 cm). Fractions are eluted with PBS and their radioactivity is measured. Degradation fragments of heparan sulfate side chains are eluted from Sepharose 6B at 0.5<Kav <0.8 (peak II). Each experiment is done at least three times. Degradation fragments corresponding to “peak II,” as described by Vlodavsky et al., is indicative of the activity of the polypeptides of the invention in cleaving heparan sulfate.

### Example 63

### Immobilization of Biomolecules

[1292] This example provides a method for the stabilization of polypeptides of the invention in non-host cell lipid bilayer constucts (see, e.g., Bieri et al., Nature Biotech 17:1105-1108 (1999), hereby incorporated by reference in its entirety herein) which can be adapted for the study of polypeptides of the invention in the various functional assays described above. Briefly, carbohydrate-specific chemistry for biotinylation is used to confine a biotin tag to the extracellular domain of the polypeptides of the invention, thus allowing uniform orientation upon immobilization. A 50 uM solution of polypeptides of the invention in washed membranes is incubated with 20 mM NaIO4 and 1.5 mg/ml (4 mM) BACH or 2 mg/ml (7.5 mM) biotin-hydrazide for 1 hr at room temperature (reaction volume, 150 ul). Then the sample is dialyzed (Pierce Slidealizer Cassett, 10 kDa cutoff; Pierce Chemical Co., Rockford Ill.) at 4C first for 5 h, exchanging the buffer after each hour, and finally for 12 h against 500 ml buffer R (0.15 M NaCl, 1 mM MgCl2, 10 mM sodium phosphate, pH 7). Just before addition into a cuvette, the sample is diluted 1:5 in buffer ROG50 (Buffer R supplemented with 50 mM octylglucoside).

### Example 64

### TAQMAN

[1293] Quantitative PCR (QPCR). Total RNA from cells in culture are extracted by Trizol separation as recommended by the supplier (LifeTechnologies). (Total RNA is treated with DNase I (Life Technologies) to remove any contaminating genomic DNA before reverse transcription.) Total RNA (50 ng) is used in a one-step, 50 ul, RT-QPCR, consisting of Taqman Buffer A (Perkin-Elmer; 50 mM KCl/10 mM Tris, pH 8.3), 5.5 mM MgCl₂, 240 μM each dNTP, 0.4 units RNase inhibitor(Promega), 8%glycerol, 0.012% Tween-20, 0.05% gelatin, 0.3 uM primers, O. 1 uM probe, 0.025units Amplitaq Gold (Perkin-Elmer) and 2.5 units Superscript II reverse transcriptase (Life Technologies). As a control for genomic contamination, parallel reactions are setup without reverse transcriptase. The relative abundance of (unknown) and 18S RNAs are assessed by using the Applied Biosystems Prism 7700 Sequence Detection System (Livak, K. J., Flood, S. J., Marmaro, J., Giusti, W. & Deetz, K. (1995) PCR Methods Appl. 4, 357-362). Reactions are carried out at 48° C. for 30 min, 95° C. for 10 min, followed by 40 cycles of 95° C. for 15s, 60° C. for 1 min. Reactions are performed in triplicate.

[1294] Primers (f & r) and FRET probes sets are designed using Primer Express Software (Perkin-Elmer). Probes are labeled at the 5′-end with the reporter dye 6-FAM and on the 3′-end with the quencher dye TAMRA (Biosource International, Camarillo, Calif. or Perkin-Elmer).

### Example 65

### Assays for Metalloproteinase Activity

[1295] Metalloproteinases (EC 3.4.24.-) are peptide hydrolases which use metal ions, such as Zn²⁺, as the catalytic mechanism. Metalloproteinase activity of polypeptides of the present invention can be assayed according to the following methods.

[1296] Proteolysis of alpha-2-macroglobulin

[1297] To confirm protease activity, purified polypeptides of the invention are mixed with the substrate alpha-2-macroglobulin (0.2 unit/ml; Boehringer Mannheim, Germany) in 1× assay buffer (50 mM HEPES, pH 7.5, 0.2 M NaCl, 10 mM CaCl₂, 25 μM ZnCl₂ and 0.05% Brij-35) and incubated at 37° C. for 1-5 days. Trypsin is used as positive control. Negative controls contain only alpha-2-macroglobulin in assay buffer. The samples are collected and boiled in SDS-PAGE sample buffer containing 5% 2-mercaptoethanol for 5-min, then loaded onto 8% SDS-polyacrylamide gel. After electrophoresis the proteins are visualized by silver staining. Proteolysis is evident by the appearance of lower molecular weight bands as compared to the negative control.

[1298] Inhibition of alpha-2-macroglobulin Proteolysis by Inhibitors of Metalloproteinases

[1299] Known metalloproteinase inhibitors (metal chelators (EDTA, EGTA, AND HgCl₂), peptide metalloproteinase inhibitors (TIMP-1 and TIMP-2), and commercial small molecule MMP inhibitors) are used to characterize the proteolytic activity of polypeptides of the invention. The three synthetic MMP inhibitors used are: MMP inhibitor I, [IC₅₀=1.0 μM against MMP-1 and MMP-8; IC₅₀=30 μM against MMP-9; IC₅₀=150 μM against MMP-3]; MMP-3 (stromelysin-1) inhibitor I [IC₅₀=5 μM against MMP-3], and MMP-3 inhibitor II [Kᵢ=130 nM against MMP-3]; inhibitors available through Calbiochem, catalog # 444250, 444218, and 444225, respectively). Briefly, different concentrations of the small molecule MMP inhibitors are mixed with purified polypeptides of the invention (50 μg/ml) in 22.9 μl of 1×HEPES buffer (50 mM HEPES, pH 7.5, 0.2 M NaCl, 10 mM CaCl₂, 25 μM ZnCl₂ and 0.05%Brij-35) and incubated at room temperature (24° C.) for 2-hr, then 7.1 μl of substrate alpha-2-macroglobulin (0.2 unit/ml) is added and incubated at 37° C. for 20-hr. The reactions are stopped by adding 4× sample buffer and boiled immediately for 5 minutes. After SDS-PAGE, the protein bands are visualized by silver stain.

[1300] Synthetic Fluorogenic Peptide Substrates Cleavage Assay

[1301] The substrate specificity for polypeptides of the invention with demonstrated metalloproteinase activity can be determined using synthetic fluorogenic peptide substrates (purchased from BACHEM Bioscience Inc). Test substrates include, M-1985, M-2225, M-2105, M-2110, and M-2255. The first four are MMP substrates and the last one is a substrate of tumor necrosis factor-α (TNF-α) converting enzyme (TACE). All the substrates are prepared in 1:1 dimethyl sulfoxide (DMSO) and water. The stock solutions are 50-500 μM. Fluorescent assays are performed by using a Perkin Elmer LS 50B luminescence spectrometer equipped with a constant temperature water bath. The excitation λ is 328 nm and the emission λ is 393 nm. Briefly, the assay is carried out by incubating 176 μl 1× HEPES buffer (0.2 M NaCl, 10 mM CaCl₂, 0.05% Brij-35 and 50 mM HEPES, pH 7.5) with 4 μM of substrate solution (50 μM) at 25<C for 15 minutes, and then adding 20 μl of a purified polypeptide of the invention into the assay cuvett. The final concentration of substrate is 1 μM. Initial hydrolysis rates are monitored for 30-min.

### Example 66

### Characterization of the cDNA Contained in a Deposited Plasmid

[1302] The size of the cDNA insert contained in a deposited plasmid may be routinely determined using techniques known in the art, such as PCR amplification using synthetic primers hybridizable to the 3′ and 5′ ends of the cDNA sequence. For example, two primers of 17-30 nucleotides derived from each end of the cDNA (i.e., hybridizable to the absolute 5′ nucleotide or the 3′ nucleotide end of the sequence of SEQ ID NO:X, respectively) are synthesized and used to amplify the cDNA using the deposited cDNA plasmid as a template. The polymerase chain reaction is carried out under routine conditions, for instance, in 25 ul of reaction mixture with 0.5 ug of the above cDNA template. A convenient reaction mixture is 1.5-5 mM MgCl₂, 0.01% (w/v) gelatin, 20 uM each of DATP, dCTP, dGTP, dTTP, 25 pmol of each primer and 0.25 Unit of Taq polymerase. Thirty five cycles of PCR (denaturation at 94 degree C. for 1 min; annealing at 55 degree C. for 1 min; elongation at 72 degree C. for 1 min) are performed with a Perkin-Elmer Cetus automated thermal cycler. The amplified product is analyzed by agarose gel electrophoresis. The PCR product is verified to be the selected sequence by subcloning and sequencing the DNA product.

[1303] Use of the above methodologies and/or other methodologies known in the art generates fragments from the clone corresponding to the approximate fragments described in Table 8, below. Accordingly, Table 8 provides a physical characterization of certain clones encompassed by the invention. The first column provides the unique clone identifier, “Clone ID NO:Z”, for cDNA clones of the invention, as described in Table 1A. The second column provides the approximate size of the cDNA insert contained in the corresponding cDNA clone.

TABLE 8

| | cDNA |
|---|---|
| Clone ID | Insert |
| NO: Z | Size: |
| HTOBE75 | 1800 |
| HCFAT05 | 2200 |
| HFIAH37 | 1700 |
| HSVAW49 | 1000 |
| HCUEV29 | 700 |
| HLQDT35 | 1300 |
| HWLHK29 | 1000 |
| HDPRU43 | 3000 |
| HOHCE47 | 2200 |
| HSDII69 | 1500 |
| HHASQ32 | 900 |
| HTNGF69 | 800 |
| HMSJL96 | 1900 |
| HTTIE47 | 900 |
| HSLCF96 | 1600 |
| HSFAM09 | 300 |
| HNFHK77 | 1300 |
| HSDIW73 | 1600 |
| HFVGD23 | 1900 |
| HWHHB69 | 2900 |
| HFXLC69 | 1700 |
| HTEFO45 | 900 |
| HOHBN82 | 1400 |
| HWHGF52 | 2200 |
| HFPBW22 | 1000 |
| HE8UX76 | 1800 |
| HTEMV66 | 800 |
| HOUHL51 | 700 |
| HFRBN81 | 3000 |
| HACCH94 | 1400 |
| HE8TI39 | 2800 |
| H7TBC95 | 700 |
| HAPPX52 | 2400 |
| HBGSJ13 | 700 |
| HTLGP15 | 900 |
| HCFCF47 | 1900 |
| HDQHB19 | 1600 |
| HAGDN53 | 1600 |
| HUFDB74 | 1600 |
| HOUGD29 | 2300 |
| HWWDN34 | 1300 |
| HDMAV01 | 1800 |
| HMCGL45 | 1100 |
| HELEF11 | 1400 |
| HSOBC04 | 1200 |
| HNHNP81 | 1100 |
| HFIDL68 | 1100 |
| HRDBH58 | 2000 |
| HCE5J51 | 2800 |
| HHEFQ42 | 1200 |
| HE8QH09 | 1500 |
| HHFOC79 | 2100 |
| HTLIY52 | 1300 |
| HWAGU62 | 2200 |
| HPMFI38 | 1000 |
| HOFMS43 | 1100 |
| HTEPE35 | 700 |
| HAJAV28 | 1600 |
| HMTBB17 | 400 |
| HKGDE58 | 1300 |
| HCHMW40 | 900 |
| HE8QZ34 | 1900 |
| HBXDMO7 | 2200 |
| HKADO36 | 1300 |
| HFXKG51 | 1100 |
| HFPHR82 | 1600 |
| HMVAM09 | 1800 |
| HSLJD02 | 1000 |
| HBGMG39 | 300 |
| HSXBV89 | 2200 |
| HDPLT62 | 2700 |
| HSDJI44 | 2100 |
| HFXDP53 | 1600 |
| HLDBC63 | 900 |
| HCFMT57 | 2200 |
| HTEON29 | 600 |
| HE9TK49 | 1400 |
| HCEEN06 | 800 |
| HSPBQ12 | 1200 |
| HCMSL08 | 1800 |
| HOUDH19 | 400 |
| HDPFF24 | 1800 |
| HWLFH94 | 1200 |
| HWMBM13 | 900 |
| HBIBQ89 | 2600 |
| HWBEG18 | 500 |
| HFCBB56 | 2200 |
| HLHCR16 | 3800 |
| HE6GF02 | 600 |
| HOUFT36 | 1900 |
| HUJAD24 | 1700 |
| HCOMM05 | 1700 |
| HSLJE54 | 2000 |
| HWNCY05 | 1000 |
| HHFJH79 | 2300 |
| HCE5I78 | 3200 |
| HWHGW72 | 1700 |
| HNSAA28 | 1600 |
| HLWAR77 | 1300 |
| HTTJW49 | 1500 |
| HUFCN91 | 2500 |
| HCEMU86 | 2200 |
| HRDAF83 | 1300 |
| HUVGZ88 | 2100 |
| HOEET48 | 1500 |
| HEOPL36 | 2100 |
| HMCFS02 | 1500 |
| HDPSR15 | 1700 |

[1304] It will be clear that the invention may be practiced otherwise than as particularly described in the foregoing description and examples. Numerous modifications and variations of the present invention are possible in light of the above teachings and, therefore, are within the scope of the appended claims.

[1305] The entire disclosure of each document cited (including patents, patent applications, journal articles, abstracts, laboratory manuals, books, or other disclosures) in the Background of the Invention, Detailed Description, and Examples is hereby incorporated herein by reference. In addition, the CD-R copy of the sequence listing submitted herewith and the corresponding computer readable form are both incorporated herein by reference in their entireties. The specification and sequence listing of each of the following U.S. applications are herein incorporated by reference in their entirety: Application No. 60/179,065, filed on Jan. 31, 2000; Application No. 60/180,628, filed on Feb. 4, 2000; Application No. 60/214,886, filed on Jun. 28, 2000; Application No. 60/217,487, filed on Jul. 11, 2000; Application No. 60/225,758, filed on Aug. 14, 2000; Application No. 60/220,963, filed on Jul. 26, 2000; Application No. 60/217,496, filed on Jul. 11, 2000; Application No. 60/225,447, filed on Aug. 14, 2000; Application No. 60/218,290, filed on Jul. 14, 2000; Application No. 60/225,757, filed on Aug. 14, 2000; Application No. 60/226,868, filed on Aug. 22, 2000; Application No. 60/216,647, filed on Jul. 7, 2000; Application No. 60/225,267, filed on Aug. 14, 2000; Application No. 60/216,880, filed on Jul. 7, 2000; Application No. 60/225,270, filed on Aug. 14, 2000; Application No. 60/251,869, filed on Dec. 8, 2000; Application No. 60/235,834, filed on Sep. 27, 2000; Application No. 60/234,274, filed on Sep. 21, 2000; Application No. 60/234,223, filed on Sep. 21, 2000; Application No. 60/228,924, filed on Aug. 30, 2000; Application No. 60/224,518, filed on Aug. 14, 2000; Application No. 60/236,369, filed on Sep. 29, 2000; Application No. 60/224,519, filed on Aug. 14, 2000; Application No. 60/220,964, filed on Jul. 26, 2000; Application No. 60/241,809, filed on Oct. 20, 2000; Application No. 60/249,299, filed on Nov. 17, 2000; Application No. 60/236,327, filed on Sep. 29, 2000; Application No. 60/241,785, filed on Oct. 20, 2000; Application No. 60/244,617, filed on Nov. 1, 2000; Application No. 60/225,268, filed on Aug. 14, 2000; Application No. 60/236,368, filed on Sep. 29, 2000; Application No. 60/251,856, filed on Dec. 8, 2000; Application No. 60/251,868, filed on Dec. 8, 2000; Application No. 60/229,344, filed on Sep. 1, 2000; Application No. 60/234,997, filed on Sep. 25, 2000; Application No. 60/229,343, filed on Sep. 1, 2000; Application No. 60/229,345, filed on Sep. 1, 2000; Application No. 60/229,287, filed on Sep. 1, 2000; Application No. 60/229,513, filed on Sep. 5, 2000; Application No. 60/231,413, filed on Sep. 8, 2000; Application No. 60/229,509, filed on Sep. 5, 2000; Application No. 60/236,367, filed on Sep. 29, 2000; Application No. 60/237,039, filed on Oct. 2, 2000; Application No. 60/237,038, filed on Oct. 2, 2000; Application No. 60/236,370, filed on Sep. 29, 2000; Application No. 60/236,802, filed on Oct. 2, 2000; Application No. 60/237,037, filed on Oct. 2, 2000; Application No. 60/237,040, filed on Oct. 2, 2000; Application No. 60/240,960, filed on Oct. 20, 2000; Application No. 60/239,935, filed on Oct. 13, 2000; Application No. 60/239,937, filed on Oct. 13, 2000; Application No. 60/241,787, filed on Oct. 20, 2000; Application No. 60/246,474, filed on Nov. 8, 2000; Application No. 60/246,532, filed on Nov. 8, 2000; Application No. 60/249,216, filed on Nov. 17, 2000; Application No. 60/249,210, filed on Nov. 17, 2000; Application No. 60/226,681, filed on Aug. 22, 2000; Application No. 60/225,759, filed on Aug. 14, 2000; Application No. 60/225,213, filed on Aug. 14, 2000; Application No. 60/227,182, filed on Aug. 22, 2000; Application No. 60/225,214, filed on Aug. 14, 2000; Application No. 60/235,836, filed on Sep. 27, 2000; Application No. 60/230,438, filed on Sep. 6, 2000; Application No. 60/215,135, filed on Jun. 30, 2000; Application No. 60/225,266, filed on Aug. 14, 2000; Application No. 60/249,218, filed on Nov. 17, 2000; Application No. 60/249,208, filed on Nov. 17, 2000; Application No. 60/249,213, filed on Nov. 17, 2000; Application No. 60/249,212, filed on Nov. 17, 2000; Application No. 60/249,207, filed on Nov. 17, 2000; Application No. 60/249,245, filed on Nov. 17, 2000; Application No. 60/249,244, filed on Nov. 17, 2000; Application No. 60/249,217, filed on Nov. 17, 2000; Application No. 60/249,211, filed on Nov. 17, 2000; Application No. 60/249,215, filed on Nov. 17, 2000; Application No. 60/249,264, filed on Nov. 17, 2000; Application No. 60/249,214, filed on Nov. 17, 2000; Application No. 60/249,297, filed on Nov. 17, 2000; Application No. 60/232,400, filed on Sep. 14, 2000; Application No. 60/231,242, filed on Sep. 8, 2000; Application No. 60/232,081, filed on Sep. 8, 2000; Application No. 60/232,080, filed on Sep. 8, 2000; Application No. 60/231,414, filed on Sep. 8, 2000; Application No. 60/231,244, filed on Sep. 8, 2000; Application No. 60/233,064, filed on Sep. 14, 2000; Application No. 60/233,063, filed on Sep. 14, 2000; Application No. 60/232,397, filed on Sep. 14, 2000; Application No. 60/232,399, filed on Sep. 14, 2000; Application No. 60/232,401, filed on Sep. 14, 2000; Application No. 60/241,808, filed on Oct. 20, 2000; Application No. 60/241,826, filed on Oct. 20, 2000; Application No. 60/241,786, filed on Oct. 20, 2000; Application No. 60/241,221, filed on Oct. 20, 2000; Application No. 60/246,475, filed on Nov. 8, 2000; Application No. 60/231,243, filed on Sep. 8, 2000; Application No. 60/233,065, filed on Sep. 14, 2000; Application No. 60/232,398, filed on Sep. 14, 2000; Application No. 60/234,998, filed on Sep. 25, 2000; Application No. 60/246,477, filed on Nov. 8, 2000; Application No. 60/246,528, filed on Nov. 8, 2000; Application No. 60/246,525, filed on Nov. 8, 2000; Application No. 60/246,476, filed on Nov. 8, 2000; Application No. 60/246,526, filed on Nov. 8, 2000; Application No. PT172, filed on Nov. 17, 2000; Application No. 60/246,527, filed on Nov. 8, 2000; Application No. 60/246,523, filed on Nov. 8, 2000; Application No. 60/246,524, filed on Nov. 8, 2000; Application No. 60/246,478, filed on Nov. 8, 2000; Application No. 60/246,609, filed on Nov. 8, 2000; Application No. 60/246,613, filed on Nov. 8, 2000; Application No. 60/249,300, filed on Nov. 17, 2000; Application No. 60/249,265, filed on Nov. 17, 2000; Application No. 60/246,610, filed on Nov. 8, 2000; Application No. 60/246,611, filed on Nov. 8, 2000; Application No. 60/230,437, filed on Sep. 6, 2000; Application No. 60/251,990, filed on Dec. 8, 2000; Application No. 60/251,988, filed on Dec. 5, 2000; Application No. 60/251,030, filed on Dec. 5, 2000; Application No. 60/251,479, filed on Dec. 6, 2000; Application No. PJ005, filed on Dec. 5, 2000; Application No. PJ006, filed on Dec. 6, 2000; Application No. 60/251,989, filed on Dec. 8, 2000; Application No. 60/250,391, filed on Dec. 1, 2000; and Application No. 60/254,097, filed on Dec. 11, 2000.

[1306] Moreover, the microfiche copy and the corresponding computer readable form of the Sequence Listing of U.S. Application Serial No. 60/179,065, and the hard copy of and the corresponding computer readable form of the Sequence Listing of U.S. Application Serial No. 60/180,628 are also incorporated herein by reference in their entireties.

[image]

[image]

[image]

[image]

[image]

[image]

[image]

[image]

[image]

[image]

[image]

[image]

[image]

[image]

[image]

[image]

[image]

[image]

[image]

[image]

[image]

[image]

[image]

[image]

[image]

[image]

[image]

[image]

[image]

The application's sequence listing, which the Patent Office published only in electronic form, follows.

SEQUENCE LISTING (1249 sequences)

SEQ ID NO: 1 - DNA, 733 bp, Homo sapiens
gggatccggagcccaaatcttctgacaaaactcacacatgcccaccgtgcccagcacctgaattcgagggtgcaccgtcagtcttcctcttccccccaaaacccaaggacaccctcatgatctcccggactcctgaggtcacatgcgtggtggtggacgtaagccacgaagaccctgaggtcaagttcaactggtacgtggacggcgtggaggtgcataatgccaagacaaagccgcgggaggagcagtacaacagcacgtaccgtgtggtcagcgtcctcaccgtcctgcaccaggactggctgaatggcaaggagtacaagtgcaaggtctccaacaaagccctcccaacccccatcgagaaaaccatctccaaagccaaagggcagccccgagaaccacaggtgtacaccctgcccccatcccgggatgagctgaccaagaaccaggtcagcctgacctgcctggtcaaaggcttctatccaagcgacatcgccgtggagtgggagagcaatgggcagccggagaacaactacaagaccacgcctcccgtgctggactccgacggctccttcttcctctacagcaagctcaccgtggacaagagcaggtggcagcaggggaacgtcttctcatgctccgtgatgcatgaggctctgcacaaccactacacgcagaagagcctctccctgtctccgggtaaatgagtgcgacggccgcgactctagaggat

SEQ ID NO: 2 - protein, 5 aa, Homo sapiens
  Site (3): Xaa equals any of the twenty naturally ocurring L-amino acids
WSXWS

SEQ ID NO: 3 - DNA, 86 bp, Artificial Sequence
  Primer_Bind: Synthetic sequence with 4 tandem copies of the GAS binding site found in the IRF1 promoter (Rothman et al., Immunity 1:457-468 (1994)), 18 nucleotides complementary to the SV40 early promoter, and a Xho I restriction site.
gcgcctcgagatttccccgaaatctagatttccccgaaatgatttccccgaaatgatttccccgaaatatctgccatctcaattag

SEQ ID NO: 4 - DNA, 27 bp, Artificial Sequence
  Primer_Bind: Synthetic sequence complementary to the SV40 promter; includes a Hind III restriction site.
gcggcaagctttttgcaaagcctaggc

SEQ ID NO: 5 - DNA, 271 bp, Artificial Sequence
  Protein_Bind: Synthetic promoter for use in biological assays; includes GAS binding sites found in the IRF1 promoter (Rothman et al., Immunity 1:457-468 (1994)).
ctcgagatttccccgaaatctagatttccccgaaatgatttccccgaaatgatttccccgaaatatctgccatctcaattagtcagcaaccatagtcccgcccctaactccgcccatcccgcccctaactccgcccagttccgcccattctccgccccatggctgactaattttttttatttatgcagaggccgaggccgcctcggcctctgagctattccagaagtagtgaggaggcttttttggaggcctaggcttttgcaaaaagctt

SEQ ID NO: 6 - DNA, 32 bp, Artificial Sequence
  Primer_Bind: Synthetic primer complementary to human genomic EGR-1 promoter sequence (Sakamoto et al., Oncogene 6:867-871 (1991)); includes a Xho I restriction site.
gcgctcgagggatgacagcgatagaaccccgg

SEQ ID NO: 7 - DNA, 31 bp, Artificial Sequence
  Primer_Bind: Synthetic primer complementary to human genomic EGR-1 promoter sequence (Sakamoto et al., Oncogene 6:867-871 (1991)); includes a Hind III restriction site.
gcgaagcttcgcgactccccggatccgcctc

SEQ ID NO: 8 - DNA, 12 bp, Homo sapiens
ggggactttccc

SEQ ID NO: 9 - DNA, 73 bp, Artificial Sequence
  Primer_Bind: Synthetic primer with 4 tandem copies of the NF-KB binding site (GGGGACTTTCCC), 18 nucleotides complementary to the 5' end of the SV40 early promoter sequence, and a XhoI restriction site.
gcggcctcgaggggactttcccggggactttccggggactttccgggactttccatcctgccatctcaattag

SEQ ID NO: 10 - DNA, 256 bp, Artificial Sequence
  Protein_Bind: Synthetic promoter for use in biological assays; includes NF-KB binding sites.
ctcgaggggactttcccggggactttccggggactttccgggactttccatctgccatctcaattagtcagcaaccatagtcccgcccctaactccgcccatcccgcccctaactccgcccagttccgcccattctccgccccatggctgactaattttttttatttatgcagaggccgaggccgcctcggcctctgagctattccagaagtagtgaggaggcttttttggaggcctaggcttttgcaaaaagctt

SEQ ID NO: 11 - DNA, 1575 bp, Homo sapiens
  SITE (1447): n equals a,t,g, or c
  SITE (1505): n equals a,t,g, or c
  SITE (1508): n equals a,t,g, or c
  SITE (1543): n equals a,t,g, or c
  SITE (1557): n equals a,t,g, or c
ggataggaaaaagaaaagcacacaagttttatttggaatgaaggcaattcacaggtcacaaaataattcatgctgaaagggcctgcagagttcttgcactgtgatgtcttcgagccatctttattgtcatgctgcatgcacgtatagaaaatggaataggtccattctatgtagccatttttgattttctgaaccacctaactacttgtacccacctgcaatgtgtaattcatggggcagtgccctccttacacaaccgcacacgctcacaggcaccaactcacagggattctccttgtccacgstacctgtgagcccaaagtgacagccccacaaaggagcttycacaamttyccaaaccgtctctgctccttgctttcttccacctgctccccagaggccccaggaaggagttggccctgatgagaacggtgctccatgggtgaccgcgaatccggcttagccctcactccggtcccacgtgtggcccagtccattctcagctcattcccctggaaagcaagatcatggtcttcagaggcctcccgcttctaacatttcctaactcartggttgccrctctcctgtgaccagcccttcttcccacctyamtgtgaaaaattcccagaagccaggatcacgactcacttgtcttcacataatggatatttacttaatatttattatcaatttccccacctccaaccctgtccctggcacacacttggcatcatttatccaataggggactgggaattttggtgaagtgaatcaaggctattcagggtcaagagagagattaacttgaatgggccaatttgctagataattaatgtcttaaaaaccaaaaccagagagaagcccacagccctgtcctctgtggcttgaaaaagaaacccagcatcagaggaatgagcgatgatgccccctggggcgcccacttctgtttgtcaggagggatggtcggaggggcagctcacctggcgaggtgatggctctgcatttcccacgaacatatatgtgacatgtacataaatataaatacttatgtttataaatgttgaatggttccttctagctgtggctgagtagacgttggtgtttctaacttctttcagtgtgttagagattgattacatgctagctataaaaagtaaaataaatattttmccatgctattaaagcttggaccattatcaaacacacacaaacacacactcattctgctgtttaaaaattcatctgcgttcgttctcccaggagtgctccagggaaccacaggcttcccggcacttgaaggctgaactgagcgtgagtgccctggtccccaggaagcargcggatgctgcaggaargtggcagacagcctgcatccaggarggccccaggaagtggggatgctkcaggaaggcggcacaaagcctgcatccgggaggggcccaggaanaaggggatctgcaggaaagttgcagacagacttcatccaggaggggacagttacctgnaanccgtcttcagaaatttggccaccagttccgtaatnccaaccaaagaatnccgtccagcttcaaatgt

SEQ ID NO: 12 - DNA, 653 bp, Homo sapiens
  SITE (434): n equals a,t,g, or c
  SITE (621): n equals a,t,g, or c
  SITE (646): n equals a,t,g, or c
  SITE (652): n equals a,t,g, or c
aattcggcacgcggrgatattttacattgtttgaaattagccttcaaaatccaatggacattttatgcttaagcgcatctcaattcagactagtcacattttgggtgctcaagagccactcgtggctatagtggccacttggtggacagcaaagctccaggcttcaagggaggaggggctcaacaggtaacatagtaagtgggctgtgggggaggttggcaggctagaggggcaccttatgcaaagtcccgccaagcaagacacaaagctcctggtttgtttgtgtttttgttttgttttgctgattttkgaaactaggattctggatttttctgtgaaatctctggagttttaagcattggcaatgattcaaagatttaaaaacccagcacaggccaaatggaacaagtgtgaagtgcctcctgggatgtagngactcccagggtgtgagctctttgagccccacagtgctccttcggttctcaggggtcctgctccactctactgagtttaggcaccaacccctgtgcagaacttctctcccctgcccccagcttcctctcaacccccatccctgggccttaccgcactgaaccttcctgggctgggttccatggggtnggcttccctaccaaagcatgaagtncgtggna

SEQ ID NO: 13 - DNA, 362 bp, Homo sapiens
  SITE (248): n equals a,t,g, or c
  SITE (296): n equals a,t,g, or c
  SITE (347): n equals a,t,g, or c
aattcggcacgaggttaaattctgtgataattgttggtttccattatttttattttttatcctcagtgatttaattttatcatacaagatctatcaaatattttccatgttttaagttgtcctgaagcagatccacgttattaatagactaattttaatcttgacaaaatcaaatgcaaagtgatcccaagtttatttctggttctaaatgatcaaaaagaccatcatatttctggcttatctcaatnttctctcatgtggcttcccttgtctagtagctttatattcgtatagtncaattatagctgatacactcttggtaagggttgggggtaaaagttcattgngtaatagcctttttt

SEQ ID NO: 14 - DNA, 446 bp, Homo sapiens
  SITE (29): n equals a,t,g, or c
aagtcaagccagatgaaaactccaaagcnttttatgtgccagcccagtatgtgaaggaggtcacgcgcaaagctctcatgccacctgttaagcaggtagctggtctgccaaataactccacgaaaataatgcagagtttgcatcttcagagatcaacagaaaatgtgaacaaattgcctgagctttcaagtttcggaaagccatcgtcatctgttcaaggaacaggtcttattcgtgatgccaatcagaattttggacccagttataatcaaggtcagactgtcaacctaagcctggacctgacccataataacggaaagtttaacaatgactcacattctcctaaagtttccagccagaataggacamgsttcatttggtcattttcccggtccagagttcttgggatgtagagaaaactagcttctcccagggacaatcttgtg

SEQ ID NO: 15 - DNA, 1279 bp, Homo sapiens
  SITE (211): n equals a,t,g, or c
  SITE (523): n equals a,t,g, or c
  SITE (1169): n equals a,t,g, or c
  SITE (1226): n equals a,t,g, or c
aaagggccctgggtccttgccatggatgaatgtggttcccgcatccgccggcgggtgtctctccccaaaaggaaccgtccaagcttggggtgtatttttggcgctcccaccgcggccgagctcgagcccggagatgaggggaaagaggaggaggaaatggtggctgagaacaggaggcggaaaaccgcgggcgtactgccggttgagcctnaatgacagtgaagtggacatgtttggwgactatgatagctktactgaaaactcctttatagctcaagttgacgacctggaacaaaaatatatgcaactccctgaacataagaaacatgctacagactttgccactgaaaatctttgctcggaaagtatcaaaaacaaactcagcattactaccataggcaaccttactgaattacaaactgataagcacacagagaaccagagtggatatgaaggtgtcactattgaacctggagctgatcttttgkatgatgtaccttcctcacaggctatatactttganaatttgcagaactcttcaaatgatttgggtgatcattctatgaaagamagggattggaagtcatcctctcacaacactgtgaatgaggaactgccccataattgcatagagcaaccccagcaaaatgatgagtcctcttccaaagtcagaactagttcagatatgaacaggagaaaaagtattaaagatcatctaaaaaatgccatgactggaaatgcgaaggcccagacaccaatattttctagaagtaaacagctcaaagacactctcctatctgaggaaattaatgttgctaagaaaacagttgagtcatcatcaaatgaccttggtcctttttattcattacccagcaaagtgagagacctttatgcccaattcaagggaattgaaaaattatatggtaatgctttttgctggaataaaaaaatttttttcctatcattaccataatattagtgcaagtaaatagaagcaaatgctttcatggtccatactgtttctcattttgaaaacaaaagatcagtgatctctcagccccttccattcctacctgtcctgctaccactgaacctctttccttccctcacagtcacacttatcaaaccagttatcctttctgtctgtttccttacctgacataattccnctaattcctcatctataagaaagggataataagttgttagcaagtcagagtctggtncagagacatgccaaattcaatgttgggaaatgattttccaatattatattggg

SEQ ID NO: 16 - DNA, 1235 bp, Homo sapiens
  SITE (1215): n equals a,t,g, or c
gatgcaaatagctcagaggtccatggtttatctaacaattaagccattaaacctgagtcaagttgaaggaaaaccatccccttggttatccgttgatactgccttgtatattctcaaggaaaatgagagtcamgcaaatctacagcttgtgtgttttaccgaactacgaaatagagaagtgtttggatggactggtgaactaggacctggaatttactggttaattccttccacaactggctgtaggctgaggaaaaaaataaaaccagtaacagatgaagcccaacttgtatatagagatgaaacaggggaattattccttacaaaggaatttaagtctactttatcagatatatttgaagtaattgatttagatggaaatggtcttcttagccttgaagaatataatttttttgaattgagaacaagtggtgagaaatgtgatgaagatgcttgggctgtctgcagagagaattttgatacaaagaggaatgaactaacaagacaaggatttatggatttgaatctaatggaagctaatgatcgagaaggagatccttgtgacctttgggtaactctacactctatgggctacaataaagctctggagttgacagaggcatgtccatttgkcattgatatctatgcagaaaaatgcmagccaaaaattaaagctgtccatatggaggcmtgtagtggacaacttgagaaggccatttgtaaatctgttcttagcaacggtgatgccaaagtaatggatggctatgaaaatataatcgtgcatacttacagttgtgacacctggataacgtcagttattgaaaacaagtcagatgagaaagtgattattcacatcagcaatgagctaagtaaaaactgcataaacaacagaggactcaacatatttgcagtagaagtgggacccaaatctacaatggtttgtcaacatgtaatgcctttgaatgaacgacaagaatggatatattattgtatatattctcttatttcttaaataattatacttagaacttaccaaactaagaattatttcagatttagtctgttatttattaaacaactaaatgctacttaactgatgtacctaaataataatctattcaatttatatgcattttcattttatgtccatggtatgtactttattattaaaatataaataatgctttmaaaaaaaaaaaaaaaaaaaaaaaattnctcggtccgcaagggaattc

SEQ ID NO: 17 - DNA, 1811 bp, Homo sapiens
ggcacgagcttcacctgcaatgaaggcttgctcctggtgggagcaagtgtgctacagtgcttggctactggaaactggaattctgttcctccagaatgccaagccattccctgcacacctttgctaagccctcagaatggaacaatgacctgtgttcaacctcttggaagttccagttataaatccacatgtcaattcatctgtgacgagggatattctttgtctggaccagaaagattggattgtactcgatcgggacgctggacagactccccaccaatgtgtgaagccatcaagtgcccagaactctttgccccagagcagggcagcctggattgttctgacactcgtggagaattcaatgttggctccacctgccatttctcttgtaacaacggctttaagctggaggggcccaataatgtggaatgcacaacttctggaagatggtcagctactccaccaacctgcaaaaggcatagcatcacttcctactccaggggtgcaatgtccagccctcaccactcctgggcagggaaccatgtactgtaggcatcatccgggaacctttggttttaataccacttgttactttggctgcaacgctggattcacactcataggagacagcactctcagctgcagaccttcaggacaatggacagcagtaactccagcatgcagagctgtgaaatgctcagaactacatgttaataagccaatagcgatgaactgctccaacctctggggaaacttcagttatggatcaatctgctctttccattgtctagagggccagttacttaatggctctgcacaaacagcatgccaagagaatggccactggtcaactaccgtgccaacctgccaagcaggaccattgactatccaggaagccctgacttactttggtggagcggtggcttctacaataggtctgataatgggtgggacgctcctggctttgctaagaaagcgtttcagacaaaaagatgatgggaaatgccccttgaatcctcacagccacctaggaacatatggagtttttacaaacgctgcatttgacccgagtccttaagagacctgtccttttcctgggctcctcattcagcctccatatgatcctgttgtgaacatcaagtttcctgctacactggacttaactataatgcatttgctgcaggtttccataaacacccatgaatcaaagacatggaattaccttagattagctctggaccagcctgttggacccgctctggaccaaccctgtttcctgagtttgggattgtggtacaatctcaaattctcaacctaccaccccttcctgtcccacctcttctcttcctgtaacacaagccacagaagccaggagcaaatgtttctgcagtagtctctgtgctttgactcacctgttacttgaaataccagtgaaccaaagagactggagcatctgactcacaagaagaccagactgtggagaaataaaaatacctctttattttttgattgaaggaaggttttctccactttgttggaaagcaggtggcatctctaattggaagaaattcctgtagcatcttctggagtctccagtggttgctgttgatgaggcctcttggacctctgctctgaggcttccagagagtcctctggatggcaccagaggctgcagaaggccaagaatcaagctagaaggccacatgtcaccgtggaccttcctgccaccagtcactgtccctcaaatgacccaaagaccaatattcaaatgcgtaattaaaagaattttccccaaaaaaaaaaaaaaaaaa

SEQ ID NO: 18 - DNA, 2159 bp, Homo sapiens
ccacgcgtccggatcgacattgtggccatcattccttattttatcactctgggtaccgagctggccgaacgacagggcaatggacagcaggccatgtctctggccatcctgagggtcatccgcctggtaagggtcttccgcatcttcaagctgtcgcgccactccaaggggctgcagatcctcgggcaaacgctgaaggcgtccatgcgggagctgggattgctcatcttcttcctctttattggggtcatccttttctccagcgcggtctactttgccgaggcagacgaccccacttcaggtttcagcagcatcccggatgccttctggtgggcagtggtaaccatgacaacagtgggttacggcgatatgcacccagtgaccatagggggcaagattgtgggatctctctgtgccatcgccggtgtcttgaccatcgcattgccagttcccgtgattgtttccaacttcaattacttctaccaccgggagacagaaggggaagagcaatcccagtacatgcacgtgggaagttgccagcacctctcctcttcagccgaggagctccgaaaagcaaggagtaactcgactctgagtaagtcggagtatatggtgatcgaagaggggggtatgaaccatagcgctttcccccagacccctttcaaaacgggcaattccactgccacctgcaccacgaacaataatcccaactcttgtgtcaacatcaaaaagatattcaccgatgtttaatatgtgatacaagtgacatgctgtgctcagtattgtgtggaacgtgcccccttggtctgcctatgcccttgttttatacatttccagaccattcatcaaggaaaggacctgaagaagtggaaagcacacttcattctccctctccctgctgcttcatactgaaacaggtgcctgttttgcaagtgggctgcattctctcagctctccttttccctcttaccctctctctctgaacattgtaaacaacagacttacgttaaacttcatttctagtacacgccctatttaaaaaagagcagtacatcctgggaggaaatgaaactaaagaacagttagagtaactgtttaacctcagaattttaaaggcagttgtttctttcctaagcacatcaattcgtagtaaatgatgcttcggtttgatggacctttcaacgttatttattgaatatgtatttcggttgcctaccctgaagatatgtggatgaagagtctaactagaataatgacttgaaaacccaccatgagttatttggtttttgacttaaattcctatttgaaccccctttcccggaattttaagtgtctctacaactttgaataaagggaaatgcccaagatgtcctgatctgactaattagtttaattctttcgggcttgctaagcatttctaaagcattagactaacagattcctgtgaagttctgtgcatatgtcccagccccaacaactatcaaagtctagaaacagatgttttcagtgttgctgagagaaacaaaaaatttcctaatgcatctgagagataagcttcggcagtatcacaagaagattaaagtggcagacaccccttccagcggaagttactaattcggacctgactgatgcagtttccatagcaacccatgtttcctgggaaacccgaaaaaggttgtcatggcatctcttgctctctagccccacctcccagcccctgccgtttccacagtaacctttccagatggttcctacttaaatgatttcataaggaaaaccactgtttgaataagccgcacaaaaaataaagttaagtctgagactctaaggaggtgaaatgaatcccaaatgcattttttaactatgaaaatcattatgtcattccataatgactgaatcaaggaggaaaatatggtgtttggaatgttagatattaaccacaataaggcatgatctggattaaatgccatttattaggcaataatttttaaagatgcttctctacagttttctttctccaagaactttcaagccaacaaatgaaatttaaaagcaaatgtaaaagtgttctgtacataagcaaatgagagattcgatcagtgtgcctgaaaccttactacaagggaccttcaggctttctctttaaaaaaaaaaaaaaa

SEQ ID NO: 19 - DNA, 1726 bp, Homo sapiens
gggtcgacccacgcgtccgtgaaatagcattttctctccttttcccagcactagtatataacctatgaggaacccttgtctctgaatctgctcagcttgaaattttgtctctgaaagaagttggtgacattaaggcatctacagagatgaggttaagaagattccagtcagtggaaagtggagcaaataacgttgtcttcatcaggacacttgggatagagcctgagaaattggtgcatcatattctccaggatatgtacaaaaccaagaaaaagaagactcgagttattttgcgaatgttacccatctcaggcacatgcaaggcttttttagaagatatgaaaaaatatgcagaaacatttttggaaccctggtttaaagctccaaacaaagggacatttcagattgtgtacaaatctcgaaataacagtcatgtgaatagagaagaagttatcagagaattggcaggaatagtgtgcaccctcaattcagaaaataaagtggatctcaccaatccacagtacacagtggtagtagaaatcatcaaagctgtctgttgcctgagtgttgtgaaagattacatgttgtttagaaaatacaatctccaggaggtggtgaagagccctaaggatccgtcacagcttaactcaaagcagggaaatgggaaagaagctaaactggaatctgcggacaaatcagaccaaaacaacacagcagaaggaaaaaataaccagcaggtaccagagaatactgaggagctggggcagacaaaaccaacgtctaatccacaggtggtaaatgagggaggagccaaacctgaacttgcaagtcaagccacagaaggatccaagtcaaatgaaaatgacttctcataggaagtcatttggtgttggagctgacagtccagtgtcgcaattttggaaggcaagatgtgagagagacgagaaccattttaggcatagaactacagacatttctgaaaaggttggtgatgaagaacttcagtcttctgagtatacttcagtatactagtgcaacaagggacacaaagaaattctgtcttaataaagaaagctacttctcaagggtattatgtggactcagtccaagctctcctgtcccattgtgcattgtctgtgacatgcaacttacaaaactagcaattgtaacaataaatcacagccacttgacaagaaaggatattcattattttcaaatggcttttggactatcaaaaacagtaaggcttttgttcagaaatcacctttagtcaaaaggtttaagaagcaaattatttagtagcagaacttatctcaggaaaggaaaatatgcatggttggtgagaatctaataacattaaaatgctggggcaagatgcagtacaaagttgaagagactttattctcaataagttgatttactgatgatatgtcatatgatgcaaaaaaggttttgtgtcattaactgaaaagtagcagcttctctatccaggatgatgagtcaacaggtttcactaatatttgtcatgctgtagcatttgtaagatttgtaaatgatgaaattcaaagaaaactttttctattgctaggagcctgccagaacaaaggccaatatataatgttgtgacatcatatctgataaccagaggtctggtatctacactcctggtgccccatcagtggttgtctccataagtcattttgcgttattaaaaaaaaaaaaaaaa

SEQ ID NO: 20 - DNA, 729 bp, Homo sapiens
  SITE (496): n equals a,t,g, or c
  SITE (649): n equals a,t,g, or c
  SITE (651): n equals a,t,g, or c
  SITE (659): n equals a,t,g, or c
  SITE (672): n equals a,t,g, or c
  SITE (715): n equals a,t,g, or c
gagctccacccgcggtggcggccgctctagaactagtggatcccccgggctgcaggaattcggcacgagaataatcagaaatatgcttgttttagcatctaaaatgattattggatactgttcataatcatcatgggagctacaatttttaattgcttcaactcaattttagtataaatatgacctaatcatttgttcagctgaagaaacttttctgctggtgacactgcaattagcaaatacttcgggttaattcctgaaaacctgatgcagaaaatcagattttcttctaagcttgtaatgatgctttgcaaaggtttccttaaggcttgaaatagtattcactattttccatttagctttaaagcatactgtattcagaagttgatatccacaatctttcttttaggraaacaaattagcatgccmagratatgratttttaattgrgcagaatctcttttaaaaaaataaagtgacctaacactttgtctgntttcctacctctccttttggtgcagaggcagtggtgtgaccattaaaagtgatttttatcccaatagaaagtatattggcccggcgcagtgtctcatgcctgtattcccagccctttgggaggccaagactggcggatcacgaggtcaggagntnaagacagnctggcaaacatgntgaaaccccgtctctactaacaatacaaaaattagctggcggngatggccccacgcc

SEQ ID NO: 21 - DNA, 342 bp, Homo sapiens
  SITE (134): n equals a,t,g, or c
  SITE (286): n equals a,t,g, or c
aattcggcacgaggtgaacagtaggcctgggggagaaattgccttcctgacaagaagagttggagatgatgaatacaaaacccctgggacactgcctggcccatagtgatgttaccatcagtagtggctttgcnktttccagattgacatccatgccctaaacagagaactttgctgagatgaaatttccttgttggtatacttttgtgaaccactccattgagaaccagcacaaagccattgccttcttgaacgtyttcattaaaactagaataatctctgcccntcatttgcccatgcacatggraaacccagggtatgcctttcctgatgggaaatatg

SEQ ID NO: 22 - DNA, 1005 bp, Homo sapiens
gagtagaggctaaataagtatttgttgaatgaatccatttgtgtgagccacattatttacattctttatttcagctaaagaatattgtagaacattatttgcctatgaaggtactaatgaagatgaacttacttttaaagagggggagataatccatttgataagtaaggtaaggtgtttctgtttttcagtgaattgcttaatttatttatagaaatatttttcaaaagttatacattcaccctagagtgttcttatattcaccctggaatctagaagagctgggactttgtcttgtttctaagtcctgaaaacttggcacgtaataagtgctcagaacgttctctttttgagctaacttttattgactatatttgttgtaatttacatattgggaattattgttaaccatcatatttgttcttttttaagtactttttttttaaaattaacctcaacttcccaggtttttattcttacttctcttccacctcattctattttttctcctgtctgtcgtttggagtgttgtttgtaatgtaaacagaagaaaaatagggaaacaagctaaacatccatgagtatggaaatggttctgaaactctttttactctggaaaatgatgtcaccattttaaagaatgaagtgattttataacttggaataaatcctaatgcaaaataaagagaaaacccagtactacttgtgtgtgggcagaatcctataataactagtattatgggaaaattacaaatattttgtttttgctataaccctgtagaataatttttgaaattctgccccccacccccaaccttttttaagtagaaatggagtcttgctatgttgtccaggctggtctcaaactcttgagctcaagcattcctctcagcactttgggaggatgaagtgggagaaggatcacttgagcctaggagttcaagaccagcctgggcaacattctgagacccctgtctctaaaaaaaaaaaaaaaaaaaaaaaaaa

SEQ ID NO: 23 - DNA, 918 bp, Homo sapiens
  SITE (824): n equals a,t,g, or c
  SITE (871): n equals a,t,g, or c
  SITE (878): n equals a,t,g, or c
ggcaatatccccaggctttccattctgccctctactcctgacacctgtggcctggggcctggttggggccatagcgtatgctggwstcctgggaactattgagctgaagctagatctagtgcttctaggggctgtggctgcagtgagctcattcctcccttttctgtggaaagcctgggctggctgggggtccaagaggcccctggcaaccctgtttcccatccctgggcccgtcctgttactcctgctgtttcgcttggctgtgttcttctctgatagttttgttgtagctgaggccagggccacccccttccttttgggctcattcatcctgctcctggttgtccagcttcactgggagggccagctgcttccacctaagctactcacaatgccccgccttggcacttcagccacaacaaaccccccacggcacaatggtgcatatgccctgaggcttggaattgggktgcttttatgtacaaggctagctgggctttttcatcgttgccctgaagagacacctgtttgccactcctctccctggctgagtcctctggcatccatggtgggtggtcgagccaagaatttgtggtatggagcttgtgtggcggygctggtggccctgttagctgccgtgcgcttgtggcttcgccgctatggtaatctcaagagccccgagccacccatgctctttgtgcgctggggactgcccctaatggcattgggtactgctgcctactgggcattggcgtcgggggcagatgaggctcccccccgtctccgggtcctggtctctggggcatccatggtgctgcctcggnctgtagcagggctggctgcttcaaggcttgcgcttgtgctctggaancctgggnaaagtgctggtgaaagcttgagcaagcgcttcaaggacca

SEQ ID NO: 24 - DNA, 456 bp, Homo sapiens
  SITE (3): n equals a,t,g, or c
  SITE (17): n equals a,t,g, or c
  SITE (78): n equals a,t,g, or c
ctnaggcccaagtttangattgatttgatttgataggataagttttacagttcagacccctttgattaccctggattnaagactcttacacaatatcgggggggaaccacagttaatgcctgcttctgactgaagccctctgaacaggcagagacatcctcctgacaaccaggatggcataatctagttcaggatctggggaaaagctattttgaatgtaaaactgggtacaggtggtaccattccagtgtcttacgtgaagatcccaggaaagttggacctaagttttcctcaagagggcagactaaaatacaaccaggggcatatgccggtcctgcagcctaataaatagccccaaagactggtgtaaaaagaaggcttttccatcaactacagaagaggaaaayagtggtggacaaaaatcagcagcagctaccaaaggaatgctcccagtgg

SEQ ID NO: 25 - DNA, 1537 bp, Homo sapiens
tccaactacatcatttttagtaagacggtcccagtcatatacttggttagktttawctttttcacacactgaaggaaacttgatctgaagattgacgacctgattccactctgggtttgcatttttctcaattatgtttgtacaaaccttttttccagcaaaggaaacttctacaaaaggatccacgagatttttcttatctgcattgcctccaaatatttcctttactgtctgtgagaaggcatcatccatctgggggatgtcctcagctcggtagattttcagcaagaaggtcacccaccggagggcaatgccagcagggagtaacaaattactctccacatcatcactgtcattatcacgatctcgtctctcaggaggaggctcatctccggttcccaggacaaacatgctgactttcatataacctttagaacctgaactggtatcttccgggtcattgagaagaagccactttctcatgacagcatggccaggttcatcataaacaaatccaacatcaatcttaaattcccccatcagacaatctgcccgcagagagtgagaattataaacccggatgctgatgatctcatccatcaattcagaaggggtcatgttgacattgtagaaaaacaactcatcaaaaaaagggttgtttcctctcttgattcttgttcggtgtgtctggccacagacgtgaactttgaccacaggccttatgttgttaccacttaactgtcggccctcaatcactcggacgcggatctggaagtcctgtggcttatttgacagcatccgccggctgttctttactttggtgagcctccgagcaagctgagcttccgacaccgtcccaactggccccttgggcccagggcccctgactgcattgtccaacctgtcttcatcaccttcatcttcttccccatctcctcccatgcctggcacgctgggcccgctcaggtcatttggatgtggagcagaaggcggatcatagccgatcaccaagtcaatggtggccccagtatcttgccctttttcatttagcagggagatcagcttgtacggcagggatctgctctggtcaccagtcaggtccttcagggctacagtcgccgtgccaattaatttattttgtccaattgtctcaaaatctttcacaataatcccaagggaagatgaaaagtccagtggtatacccctcaagtcaaactccaaaatctcattccagacagggttcaattcattatcaactttctttgttttctttttctcatccttaaaaatgacagaaacaataggatccggcttgccaaatttcgttttagggatattgctggcagattccacaatcactcgcagcatggttcttagctggtagaaagcaagtttcagcaaacgaagtggagactcgggcgctggagctccgggtcgcaccgccctgggagagaagttcgtcgacgcggccgcgaattccggaccggtacctgcaggcgtaccttctatagtgtcacctgaatagcgttaacaggga

SEQ ID NO: 26 - DNA, 714 bp, Homo sapiens
  SITE (209): n equals a,t,g, or c
gcccacgcgtccggtagtgtgtggatgaacacaatgtaatctttactggcctctttcttatagttcagactccatgtttgaacagctttggtgtttttagtttttattcatttctttttttaaaaaaatgaattatgggtgattcagggtttaatgttgtatcctaattgtgaaatctgtgcttttggacctgagcagatacctttganaccattacctcatctgttactaggaagaatgagctagcatttacattcctcccccctggcaagtctgaaaagaaatactttcccccctttttggaatgaagagactatctataattttatttgtacctttatccacaatacactgttttttccatttgatcctcttatcaaccttgtaggatcattattattattcttactttgcagttgaggaaacagacttgttggcaagtgacatagccaagacttgaaagttttttaaaattcaaagcccacattcattatcatagctactttatatctttccactgggataacaggacatgcctaattggctttttaaattaataaatatcagtttatattgctgggtcatcccccccccatagtgtttttaaataattttaaaactatcagccgattaaaaattattttaaataaatgtgatatgtgtgtgtgccctttcttcccccccaaaacccttttttccccccccccccccccc

SEQ ID NO: 27 - DNA, 717 bp, Homo sapiens
ccaccatggccacggacgagctggccaccaagctgagccggcggctgcagatggagggcgagccccagtcgcccagccgccgcgtcttcaacccctacaccgagttcaaggagttctccaggaagcagatcaaggacatggagaagatgttcaagcagtatgatgccgggcgggacggcttcatcgacctgatggagctaaaactcatgatggagaaacttggggcccctcagacccacctgggcctgaaaaacatgatcaaggaggtggatgaggactttgacagcaagctgagcttccgggagttcctcctgatcttccgcaaggcggcggccggggagcttcaggaggacagcgggctgtgcgtgctggcccgcctctctgagatcgacgtctccagtgagggtgtcaagggggccaagagcttctttgaggccaaggtccaggccatcaacgtgtccagccgcttcgaggaggagatcaaggcagagcaggaggaaaggaagaagcaggcggaggagatgaagcagcggaaagcggccttcaaggagctgcagtccacctttaagtagcgggggctgcagccgaccgccctgctccggccccagtgtggtgggcgagggtggcgcatgggaggccgagcctgaatccttgcctgtgtctgacgggaccactactaaaaacctaaaaatatctgtgaaaaaaaaaaaaaaaaaa

SEQ ID NO: 28 - DNA, 520 bp, Homo sapiens
  SITE (15): n equals a,t,g, or c
aattmggcacgaggnagacggctcagcgacgccacggccagcagcgctcgcgtcctccccagcaacagttactcaaagctaatcagatagcgaaagaagcaggagagcaagtcaagaaatacggtgaaggagtccttcccaaagttgtctaggtccttccgcgccggtgcctggtcttcgtcgtcaacaccatggacagctcccgggaaccgactctggggcgcttggacgccgctggcttctggcaggtctggcagcgctttgatgcggatgaaaaaggttacatagaagagaaggaactcgatgctttctttctccacatgttgatgaaactgggtactgatgacacggtcatgaaagcaaatttgcacaaggtgaaacagcagtttatgactacccaagatgcctctaaagatggtcgcattcggatgaaagagcttgctggtatgttcttatctgaggwtgaaaactttcttctgctctttcgscgggaaaaccactggacaagcagcgtggagtt

SEQ ID NO: 29 - DNA, 1322 bp, Homo sapiens
ggcacgaggtcatatctctgtagatttttgtgtatttaaactatttcacaattttttaaagtattaattttaaaaagcttgtgtttggagatgtgagtattcttccctccttttttcaacaaactagggcttagaaaagtgcttgtatcttaatgcagtatgcaggtttccagggaaaatgtgtaaatgtctttatacccttcgatgctgctgcccaccagtgatgtaaatcacaaagcataactcttgttttgttctgttgagcagcatgagatactttgatagagcagccttatttgtggaagcttgcctcaagtatggagcatttgaagtcactgaggacacagagaaactcatcactgctatatatgcagattatgcccggagtttgaagaacctcggttttaagcagggagcagttctctttgcttcaaaagccggagcagctggcaaagacttattgaatgagcttgagtcccccaaggaagaacccattgaagagtgacagcttaataaatgccagggaatctgacctggaaggcagatgggagggggctggtctggctgtggccaccatcacagtccaggatgaagaggagtacagggtcctgtgagctgtttgaccactgttctaagaaagactatgtgtgcccaaaagcacataagcatctatgttgagagtaagtttgtatcctacgttggtctcagaaagaacgtgaatgcttaagattttgaaagtacataatattttatactttgggagagagctttaagagtccctggaaatactttttaatttttttaacttaaaattcaagagactgaatcacttttctcattgattaaatgtaaagattattgagaaacctatagtaaatgaaatttgtaagatgttttctcaaatatatgctgtgcctgtacttatatacagtctttcaagagagatacaaacaaggcagaaacatttaaactagtattaaaggtagtttaccaaagcattttttgttttcttaccttgaaaacacagaaccgttaattccttggtttaagcagttgctaagttttttaattttaggctcagaggcccataggaggttttaagatttatgtttagtccgataggtgaggtctttgatattttgaattttaactccttttatgatacatcacagtaacctcatttttgaagtctttctttgtactttaatgttctctctgttctaatagttgaagtatgagatgtaactattataaactgttgctgaaaacataaatgtctgtaacttacaaacatcataaataaattaaaaattccatccaaa

SEQ ID NO: 30 - DNA, 757 bp, Homo sapiens
ggggtcgctccgtttccctttccgggcgggcaggcggcggaccccagtgtctttatccctcttttgcacagtcagcttctgcagctctcccgggctagcatggcagcgtggaagagttggacggccctgcggctctgcgccacagttgttgtacttgratatggtcgtctgtaaaggatttgtagaagatttagatgaatcgtttaaagaaaatcgaaatgatgacatttggcttgtagattttwatgcgccatggtgtggccattgtaaaaagctggaaccaatttggaatgaagttggtcttgagatgaaaagcattggttctccagttaaggttggaaagatggatgctacttcctattctagcattgcttcagagtttggagttcgaggttatccaacaattaagctattaaaaggggacttggcatataattatagaggaccacgaacaaaagatgatattaktgagtttgctcacagagtatctggggctctaattcggccacttccaagtcaacaaatgtttgaacatatgcagaagagacaccgtgtatttttcgtttatgtaggtggagaatcacctttgaaagagaaatacatagatgctgcttcagaattgattgtatatacatacttcttttctgcctcagaagaagtggttcctgaggtaatatttaaaatktgattttaacgacacaatkttatttattaaattattacttgatttaataaactaaattgtgattttaaaaaa

SEQ ID NO: 31 - DNA, 799 bp, Homo sapiens
  SITE (773): n equals a,t,g, or c
  SITE (782): n equals a,t,g, or c
  SITE (790): n equals a,t,g, or c
  SITE (793): n equals a,t,g, or c
ggattctgaataaaaaggatatagcagttgggataggcttgggttcttgtcctttatgttcttgtcctttcctcatgataatcaaatcataattagaaataagatgctaagaatacaaaggtggctctatgttaatactgtattgataggtcaaaggagaaaaagcatgagatcaattcattagatactgaaaagtcttttgagggaatttaatgtcttcttgctttctttattaacagaataggaataaataatagcataggcataaattaaaaataatgtaattttttaaaatctcaaactaaaaatgggaatcatacttaaacattagcattcccaggagagttggagcaagacctctgtgcccactatcactcaacatttcattatttaagtcctagcaagtgcaaaacagaaaagatgcataaatattagagaaggaaagttattttttgcaaatggcgtattttttatctggaaataccagagaatcaagtgagaaactttgaagaataaaataattcagtaatgatgcttcctaccctaggttaattaatataaagaagagttaaattcctatggcatatctggtaacaaaaacatcacttaaacttttaaatgaaaacccaaaacacttctagtattaaacatttaaawgasctgggcgcatgggctcacggctgtaattcccagcacttttgggggggccaggttgggcgggttccccaagggtccaggggttgggggggcccttcctgggccaacttgggtgnaacccccgntttttttnttnaaattt

SEQ ID NO: 32 - DNA, 533 bp, Homo sapiens
  SITE (91): n equals a,t,g, or c
gcccttcgtggccggctttgccgtcatcaccgcggcccaggacgtgtggatgctgctggggggccgcctcctcaccggcctggcctgcggngttgcctccctagtggccccggtgagtgtcccgtctctcgagtgtcctgtctcgcggcctgagaccgagggggagtgggacaaaccgctccccaggcctgggggcgcggctccccctggcgggaccttctgggtgccaggcttgaagtccctgcgttatctcgcggtccctcccgtcgaccctgggaaggatcctactgttctctccattttacactgaggtcatgacatgcagtctcggaaaggtgaagtcctttgcccaggcgaggtccacagctagtcagaggggaagcagttgcaggaacccagggttgtcccacttagccgtgcccytcttttgctctgcaaactgcggatgatccacaggagcccactccctacattttggttttcatccctggcttcggggtcaatgactgcaattagcaggaagttcctgtcct

SEQ ID NO: 33 - DNA, 955 bp, Homo sapiens
gggtcgacccacgcgtccgatttgctattaaacttcaaaatctacaaactgtaagacttgtatttaagattcaaacccagactcccaggaagaaaaccattggagaatgctcaatgtcactcagaacccttagcacacaggaaatggattactctttggatataacaccaccttcaaaaatttctgtttgccatgcagaacttgaattggggacttgttttcaagcagtaaatagcagaattcagttacaaattcttgaggcacggtaccttccaagctcatcaacacctctgactttgagttttttcgtgaaggtgggaatgtttagctcgggagagttgatttataagaaaaagacacgcttactgaaggcctccaatggaagagtcaagtggggagagactatgatttttccactcatacagagtgaaaaagaaattgtttttctcattaagctttacagtcgaagctctgtaagaagaaaacactttgtgggccagatttggataagtgaagacagtaataacattgaagcagtgaaccagtggaaagagacagtaataaatccagaaaaggttgttatcaggtggcacaaattaaatccatcttgaagacttcacacattaatttggtgaagaacttgacattcttttagaagacttatgatttcaatttgctaccaatgagaagaggcaaatcaacaaatttgtcaatttatgggggctataattatggtatataatgtatctgatagaaaatttgataagaaaatgtaatgaattttatcagatatccaaagtaaaggaaatgttttaaaactgcaacaagagacacagacagtaaaatcaaagtattattaggatgactaaataaattataaagtctgtgagaatatccaaaaaaaaaaaaaaaaaaaaaaaaaaaaaaaaaaaaaaaaaaaaaaaaaaaaaaaaaa

SEQ ID NO: 34 - DNA, 972 bp, Homo sapiens
ggtttctacaaagaataaaacatcccaacagtatagaatacaaaggctgttatttacgtgaacacacagcatggcttgtaatggaatattgtttaggatctgcttcggatttactagaagttcacaaaaagccattacaagaagtggaaatagcagcaattacacatggtgctcttcagggattagcctacttacattctcatactatgattcatagagatatcaaagcaggaaatatccttctgacagaaccaggccaggtgaaacttgctgactttggctctgcttccatggcatcacctgccaattcctttgtgggaacgccgtattggatggccccagaagtaattttagccatggatgaaggacaatatgatggcaaagtagatgtgtggtctcttggaataacatgtattgaactagcggaaaggaagcctcctttatttaatatgaatgcaatgagtgccttatatcacatagcccaaaatgaatcccctacactacagtctaatgaatggtctgattattttcgcaactttgtagattcttgcctccagaaaatccctcaagatcgacctacatcagaggaacttttaaagcacatatttgttcttcgggagcgccctgaaaccgtgttaatagatctcattcagaggacaaagsatgcagtaagagagctggacaatctgcagtatcgaaagatgrakaaactccttttccaggaggcacataatggaccagcagtagaagcacaggaagaagaagaggaacaagatcatggtgttggcyggacaggaacagttaatagtgttggaagtaatcaatccattyccagcatgtccaycagtgccagcagccaaagcagtagtgttaacagtcttccagatgtgtcagatgacaagagtgagctagacatgatggagggagcccacccagtaatgtgtggcagttctgttatccatttcaaaccag

SEQ ID NO: 35 - DNA, 2953 bp, Homo sapiens
ccacgcgtccgggaccccggtgtctggcttcccccgagccgggaccccgcgatggccaagcgcagctcgctgtacatccgcatcgtggaggggaagaaccttcccgccaaggacatcactggcagcagcgacccctactgcatcgtgaaggtggacaatgagcccatcatcaggacagccacagtgtggaagaccctgtgccccttctggggtgaggagtaccaagtgcacctgccgcccaccttccacgctgtggctttctatgtcatggatgaggatgccctcagccgggacgacgttatcggaaaggtctgccttacaagggacaccatagcctctcaccctaagggtttcagcgggtgggcccacctgacggaggtcgaccccgacgaggaggtgcagggcgagatccacctgcggctggaagtgtggccaggggcccgggcctgccggctacgctgctctgtgctggaggccagggatctggccccaaaggaccgcaatggcacatctgaccccttcgtccgagtgcgctacaagggccggacacgggagacctcgatcgtgaagaagtcatgctacccacgctggaatgagacgtttgaatttgagctgcaggagggggccatggaggcgctgtgcgtggaggcctgggactgggaccttgtcagccgaaacgacttcctgggcaaagtggtgattgatgtccagagactgcgggtggtgcagcaggaggagggctggttccggctgcagcccgaccagtccaagagccggcggcatgacgagggcaacctgggctccttgcagctggaggtgcggctgcgggacgagacggtgctgccctccagctactaccagccactggtgcacctgctgtgccacgaggtcaagctgggcatgcagggcccagggcagctgatcccactcatcgaggagacaaccagcaccgagtgtcgccaggacgtggccacgaacctgctcaagctcttcctggggcaggggctggccaaggacttcctggacctgctcttccagctggagctgagtcgcaccagtgagaccaacaccctgttccggagcaactctctggcctcaaagtccgtggagtcttttctgaaggtggccgggatgcagtacctgcacggcgtcctgggccccatcatcaacaaggtgtttgaggagaagaagtacgtggagctggaccccagcaaagtggaagttaaggatgtagggtgctccgggctgcaccgcccgcagaccgaggccgaggtgctggagcagagcgcgcagacgctgcgcgcccacctgggggccctgctgagcgcgctcagccgctcggttcgcgcgtgccccgccgtggtgcgcgccaccttccgccagctcttccggcgcgtgcgcgagcgcttccccggcgcccagcacgagaatgtaccgttcatcgccgtcaccagcttcctgtgcctgcgcttcttctctcccgccatcatgtcgcccaagctcttccacctgcgggagcgccacgcggacgcccgcaccagccgcaccctgctcctgttggccaaggcagtccagaacgtgggcaacatggacacgccggcttccagggccaaggaggcttggatggagccgctgcagcccaccgtgcgccagggcgtggcgcagctgaaggacttcatcaccaagctcgtggacatcgaggagaaggacgagctggacctgcagcggacgctgagtttgcaggcgccacctgtgaaggaggggccactcttcatccacaggaccaagggcaagggccccctcatgtcctcctccttcaagaagctctacttctccctcactaccgaggccctcagcttcgcgaagacgcccagctccaagaaaagcgccctcatcaagttagccaacatccgggcagcggaaaaggttgaggaaaagagctttggcggctcgcacgtcatgcaggtcatctacacggacgacgccggcaggccccagactgcctacctgcagtgcaagtgtgtgaatgagcttaaccagtggctgtctgcgctgcggaaggtgagcatcaacaacaccggactgctgggctcctaccaccctggcgtcttccgtggggacaagtggagctgctgccaccaaaaagagaagacaggtcagggctgcgataagacccggtcacgggtgaccctgcaggagtggaatgaccctcttgaccatgaccttgaggcccagctcatctaccggcacctgctgggcgtggaggccatgctgtgggagaggcaccgggagctgagcgggggcgcagaggcaggcacggtgcccacgagccctggcaaagtccccgaggactcattggcccggctgctccgggtgctgcaggacctccgcgaggcccatagctccagcccggccggctccccaccctcagagcccaactgcctcctggagctgcagacgtgaggcccgccctacgctccccttgctgagtcccctgccaagcgctcggagcccccccaggacactctgcaccccctcaccccggtcctcctcattagggtgcagggcctaggtctcttccaggtgggggaggggggagagtcaggaataaggggatccccagaagtgcagagctgagcaggcttgggcctgtcatggctggccggaagtgtccccagctccctacagacgctgtagccatcactgcctctccagggaccctcctctcctgcccaggacagacccagccagaaccactgctaggatgggccacacccaggggtctggcctccagggacctagagaatgggagggagaacggggccccaggagacccggccgccaccccacccgctacccttgggtgccacagggctgtgctgttgccaacagtaaacctgctcttactgtccaggcaaaaaaaaaaaaaaaaaaaaaaaaaaaaaaaaaaaaa

SEQ ID NO: 36 - DNA, 3692 bp, Homo sapiens
  SITE (3692): n equals a,t,g, or c
ggcggtttgcaatgagatcataaacattgccgaaaaatctgttcattactgcagcactgtttctcatccccttgactttcatcacaaggtatccccttctgacaataaatcatctttaatcmyttctcagcamcctcaagcccagcagcgaagagtcacccccgacaggagtcaaacctcacaagatttatttagctatcaagcattatatagctatataccacagaatgatgatgagttggaactccgcgatggagatatcgttgatgtcatggaaaaatgtgacgatggatggtttgttggtacttcaagaaggacaaagcagtttggtacttttccaggcaactatgtaaaacctttgtatctataagaagactgaaaaccatggagattatttttattggaggaggaagcatcattcatgaaccgatctttttagttgagtcagtaggaaaattaatacagtggataaagtaagaagcaaaagacagggacagagaagtgttgtgtttaaaacccaagcctgtctaaggttactgtgtattagacagggccgaactagtgtgctgagcaaaaagaattgaagcaaattgtatttacttagccgcttctgggagccacttcagcctttcccctcccctccacttcttgggtaatctgacctgaagcatagtccaggagcagagttagccagaaatgcctcctgctgccccagccttagagagctcccatctcaatcattgagcctgaaggcttcaagcccaagaatgcaacaagacccccagcctacatttctcagctcccctggagccagctgatcctgtaacgctgctggaggtcagtctgagctaccaagactgtccctagacaaaggtggagtcccccacactgcccaagaccaaatccctcactcaacctgctgaggtgtggatggggaaacagaggcaaaactgaggcacctgatgcattcagcctgctgtgcagcagtgccattgactgccctgatgttcagagagaaacgcacacaaggtttgcccatgagaattggggagcagatggccaagcagataggttatgtctgttttctgagtgatgaagtcaggaagccctgtggctctggaggccacttgtggttcattcttttcccatatccttggcttttagaaatggttaccttcaggacagtgcagctgcatttatcagagcactattgctaagttttcttttctggcttgtgtttttctgggacagtttagaattgggrggcctattctcatagaacaccaaaaatgatgttcagtgattcatttaacatacaccaatgtactctggctgctggggggacaaccataagcaagacatgcccagggtttgccgtggctccagatctactccctgtaggagttcaaggatcacacaaacggtagtaaccagggttgtgaatctgagtacaccctggcaaggcttctcttcagactgaagcagcaattctgccactaccagcagcaaccaggacgtctgttctttgtgggggccagatcagaagagagaggcccctgtgacgcccgggctgcttggtcacaactctgtccaattcaaggatgtttatcggcctctcttagatcctgagtgagacaaatacagaaatgacccattccctgcccaccagaaactcagaggtgattggggagactgacacaggaaaatgaacttaatcaagagagactgtgatatgtgctaagaagggtgtgagggagggagagatgaattttccctggagggatcctagaaagcattgtcatattgccatctccattagctcacttttaaacaactagggtgctggaagaacctttgtctgagggtagttcatagctggaaatacttggaatattttccagagtctctaaactctcatcttcccccacagatacacatccaagctcacaaataggagtagcaattctaggtggtagggttgtgtacggaacccctggctgtctgcatatatctcagaattaccccaggaccattgtcccaaagtctagagtctttacaggtaggcaaaatttgttttcaatgcctgtgcctcagctgctgtcacaaatacccatcttaggatcccatcagcttcccatcccccaccagacagccacagtaccctcactttctccctattgttctttcaaatcctgttctcaggaaagaaactgccactaattcattcacactaaggtgtaaatgattgataataggaatgagttacctcttcccacagacatttgtttttaagtatgacagagcagggccttaatcccaagggaaaaggttatggaactggagggggtgagctttctgggtagaaggagacttcctgaatttccttaaaacccagtaagagtaagacctgttgttttggaaggtctgctccaccatctaagagcactgtttttttttttttgttgttgttgttgttttacggtctctgagggaatatagtaaaaatgcatatgcacgtgcaatttgcacggcagcatttcaccgattgtggactgtattggctaatgtgtttcctggtctttagatgcaaaccattaataacactatcttatctcatagttttttcaggggtgcttcttgattagtagggaattttgaacacctctttaaatacagctagaaaataaaaccaatttgtaaagccacatttgcatatgatgccagcctcacgcatttgtatatctccagaaattcaggtatgcctcaccaatttgcccgtctttaataaaatcttgtgttaaaatttgcatcacgtcgccttcctatgtatgacgaaacaagaaacagagatttccaattgctcttttgtcttcagacatttagtaatataaagtacctatttttatgctgaaatgtttatacaggtttattaatagcaagtgcaactaactggcggcatgccttgcaacacattttgatatattagccatgcttccgggtaaaggcaagccccaaactccttatcttttgcagtctctctgggatcagtaaaagaaaaaaaaaataatgtgcttaagaagtgggactgtaaatatgtatatttaactttgtatagcccatgtacctaccttgtatagaaaaataattttaaaaatttgaatggaagggggtaaaggargtcatgaagtttttttgcatttttatttaaatgaaggaattccaaataactcacctacagatttttagcacaaaaatagccattgtaaagtgttaaaatttacgataagtattctattggggaggaaaggtaactctgatctcagttacagtttttttttcctttttaatttcattattttgggtttttggtttttgcagtcctatttatctgcagtcgtattaagtcctattgctagaataggttactacaaaaaaggttatattctgaaagaaaaataactgacattatatataaccaattaatttaaagtattgccatttaaattacacactgagagcatgtcctatgcagacatagatttttctgttcatttatttttcttcattgcagtggattgatttgataaatagatgtgttgaattactacatttgctgtacatattatttaataaactttattcagaattgcgtggcaaaaaaaaaaaaaaaaaaaaaaaaaaaaaaaaaaacn

SEQ ID NO: 37 - DNA, 3436 bp, Homo sapiens
gggaacctggataaacagacagggaaaggcagcacagccctgcactactgctgcctgaccgacaatgccgagtgcctcaagttgctcctgcgggggaaggcctccatcgagatagcaaacgagtcaggagagactccgctggacattgccaagcgcctcaagcacgagcactgtgaggagctgctgacccaagccttatctggaagatttaattctcacgttcacgttgaatatgaatggcgactactccacgaagacctggatgaaagtgatgacgacatggatgagaaattgcagcccagtcccaaccggcgggaagaccggcccatcagcttctaccagctgggctccaaccagcttcagtctaacgctgtatctttggccagagatgctgcaaaccttgccaaggagaagcagagggctttcatgcccagcatcttgcagaatgagacttacggagccctcctgagtggcagcccacctcccgcccagcctgcagcccccagcaccaccagcgcccccccgcttcctccacggaatgttggcaaagatcccctgacccccacgccgmscccacccgttgccaagacgcccagcgtaatggaagccttgagccagccgagcaagcctgccccgcctgggatctcacagatcaggcccccacctctgcccccacagccgcccagccgcctcccgcagaagaagcctgcgccgggggctgacaagtccaccccactgaccaacaaaggccaaccgagaggacctgtggatctctctgcaacggaagctctgggtcctctgtccaatgctatggtcctgcagccccctgcacccatgcctaggaagtcgcaggcaaccaagttgaagcctaagcgggtgaaagcgctctataactgtgtggctgacaaccccgatgarctcaccttctccgagggggatgtgatcatcgtggacggggaggaggaccaggagtggtggattggccacattgatggagatcctggtcgcaaaggcgcattcccggtgtcatttgtgcactttatcgctgactgaattgctactgaacaaaagcattaacagttatgttcctgtttcgttattggtaccaaaactcttgccagataaccagtttcatgaactgtttgtatggcagcccatgttctctaatgccactgctctgttttaaaaactcagaggcaatttttacrtatcagtaattgtttttataatttgtggttttcatgaaacattgctatgcatttattaggaaaaactgaatttcccaacaggtgaactgaaaagttattttaactattatacataatcaagatcctgcctctacggaattagctaaacctaaaaatgtttgcattaatgaataaattcttcctgcattccttggcccagttctggagttggtgacctttatcacaattattattttaggcggccagtgaactgctgcttcagaagtccatagcccagctctgaactttctcgataaaatgccatcagttcacctttaaagacacacattcctttgaaatccacccagtgtttaaaaagcaacttggaaatttacacattagcattgtactttctagccctaatttgtgaggttgcagctatcattatattctgcatgtatgtataacctgttgtgaacaatcatacttaacaaaactactgatggtttatgacaacgtagggtaactacagttcattctgttccaggttatataaaactgcatttcctgaatttggttaaaaactaaggatgatggattgcaaaacagttcttttaaattagtttatatgctttaggtgttttggaatttgccttcttgaacttcctgagtcacacagaaagcaactgtacacagtagaattctgtggcgcagaccatgctgtattaacacatcacttgctgtttcctactgagtgtaccactgccttcccttctagcccaggagaatgtttactcagtttagtgtcttgtatttctataatactccaacaggaatggtagtcacactgtcttgaaattgaatctgtccatctgtttataatcaagaacatatcagaaatatataggtcccaggtaatactcccaaacatcccactttttactgtttcaggccatcatatcattcttaagctacttggggtggtagtagaggattaggttgtctattataaaaccaaaactcattcgtttaatgaacttgactgtcatacctctatttagtaattgcgagggtaagattcatagtaggaatattggaaattttggcactctgagaataaataggcatatgatacccacttggacttttaacaaaagtaaaggaataaatttgcatataggcttggaaagtgaggcagcaatgctgttaactgcatttgttgtgatggtgcatttgattgaagcagcttgtctttattatgcaagactgtgtagagttttttyttttttggcattgtactttttgtttttgttataaaggaagacagaacaaactggaatgttttatgatgttgtatagcaatcgctttttacctttcaaagttccgggtaaaaatgtgttatatctgtagttttttgtttttgtttttttttaaagcactacatctgttttcactaattgttaatttctgtttgaacccttcatttaattttctcatagatttaagtaaacagatgtattttgcacagtgcacttatgtctattttaacaatcctcctgcatctgtattttatagtcagccttttgaccacctggtgccagctatataaggaataaagttgattcatatcaacattagaactccagtcccaaactaatctgtcaggttcactggtacataaatacctaggaaatatttttccagtctacaatttggtgctattgtgcagtaactaatagtactcttaccagaggagaaattatattaacgaccctgctaatatcctttcttagttatttgctccttgcaaattaaaaaagcaactaagagaaagaaaaacattgtagatatctatttatatttaaagtttatgtttcatgaactgcagctgcaggattctggcattttgcatgccattctccatcagatctgggatgatggctcagaacatgtacacagactaagagtaactgtgtgatctgttaaggggtggataacataatatgcagcttaggatgctattttgagatgtatgatattcagttcattcacctgattactttggttgcagcacaactgtatatattgtataaccgaaattgattattttcattgtccttaatgcagtgatttataattagagcatgtttaataagtttactcttcttgttaactagtcatttgactggaaaaaaataaaatacttttaaatggaaaaaaaaaaaaaaaaaaaaaaaaaaaaaaaaaa

SEQ ID NO: 38 - DNA, 2145 bp, Homo sapiens
ccgaaggagcaagcggagcggccgtcgcccaagccaagccgcgctgccaaccctcccgcccgcccgcgctcctgtccgccgtgtctagcagcggggcccagcatggtcatggcggatggcccgaggcacttgcagcgcgggccggtccgggtggggttctacgacatcgagggcacgctgggcaagggcaacttcgctgtggtgaagctggggcggcaccggatcaccaagacggaggtggcaataaaaataatcgataagtctcagctggatgcagtgaaccttgagaaaatctaccgagaagtacaaataatgaaaatgttagaccaccctcacataatcaaactttatcaggtaatggagaccaaaagtatgttgtaccttgtgacagaatatgccaaaaatggagaaatttttgactatcttgctaatcatggccggttaaatgagtctgaagccaggcgaaaattctggcaaatcctgtctgctgttgattattgtcatggtcggaagattgtgcaccgtgacctcaaagctgaaaatctcctgctggataacaacatgaatatcaaaatagcagagtatgggagttgttctttatgtccttgtctgtggagctctgccctttgatggaccgactcttccaattttgaggcagagggttctggaaggaagattccggattccgtatttcatgtcagaagattgcgagcaccttatccgaaggatgttggtcctagacccatccaaacggctaaccatagcccaaatcaaggagcataaatggatgctcatagaagttcctgtccagagacctgttctctatccacaagagcaagaaaatgagccatccatcggggagtttaatgagcaggttctgcgactgatgcacagccttggaatagatcagcagaaaaccattgagtctttgcagaacaagagctataaccactttgctgccatttatttcttgttggtggagcgcctgaaatcacatcggagcagtttcccagtggagcagagacttgatggccgccagcgtcggcctagcaccattgctgagcaaacagttgccaaggcacagactgtggggctcccagtgaccatgcattcaccgaacatgaggctgctgcgatctgccctcctcccccaggcatccaacgtggaggccttttcatttccagcatctggctgtcaggcggaagctgcattcatggaagaagagtgtgtggacactccaaaggtcaatggctgtctgcttgaccctgtgcctcctgtcctggtgcggaagggatgccagtcactgcccagcaacatgatggagacctccattgacgaagggctggagacagaaggagaggccgaggaagaccccgctcatgcctttgaggcatttcagtccacacgcagcgggcagagacggcacactctgtcagaagtgaccaatcaactggtcgtgatgcctggggcagggaaaattttctccatgaatgacaggccctcccttgacagtgtggactctgagcatgatatggcgtctgttcacagggacctgaactttctgcaagacaacccttcccttaaggacatcatgttagccaatcagccttcaccccgcatgacatctcccttcataagcctgagacctaccaacccagccatgcaggctctgagctcccagaaacgagaggtccacaacaggtctccagtgagcttcagagagggccgcagagcatcagatacctccctcacccagggaattgtagcatttagacaacatcttcagaatctggctagaaccaaaggaattctagagttgaacaaagtgcagttgttgtatgaacaaataggaccggaggcagaccctaacctggcgccggcggctcctcagctccaggaccttgctagcagctgccctcaggaagaagtttctcagcagcaggaaagcgtctccactctccctgccagcgtgcatccccagctgtccccacggcagagcctggagacccagtacctgcagcacagactccagaagcccagccttctgtcaaaggcccagaacacctgtcagctttattgcaaagaaccaccgtcgacgcggccgcgaattcccgggtcgacgagctcactagtcggcggccgctc

SEQ ID NO: 39 - DNA, 1432 bp, Homo sapiens
ggcacgagcggcacgaggggtggtgtgggtgtgtttagaaaaaagatgcattcctgaagatctctggtgctgaagggcctcgagttcctttcagagactgtatttgacacactttaggtacacacaaacgaatggtatcacatgcaatattttaatggagcaatgggagaggctctttgaaatggggtttgcatctttttgtaacattttgatttctctggtgccttattcctacttgatgctggcactcacatacccacaagaagctgacacagaagtcagccttaggcgtggggacatatgggtgatgtttgagcatgcaggggccatggggagtttggtgtcagttggtggagaagggactagatggcatctcttagccgaggccaacaggaactgcacaagtccattatagtcaaagttagcaattttgatacgtaaacacaatacttcattcttcctcatctgagctttccttccttcttccttttctatctctaccttctcataaaggtgctgctgctgctgctaaggtgcccggagtccagaatgtccattaatcactcaggcacgagcctggcactgccacgtcagcccccagcatgaccaaacccaggtttctcttgcttggggctgagaactgtcagatttttctcatcaaaaatgttttccaaggaatcagtggattacagtttttctgcattgaaaatgcactttaaaaaataaattaaagctccagactgtttaaaatatacagagggagcaggggaaagttaagcatgtgctagtgtctgaacccagttcagtttatctccagttgaaacgatatacactatattatgtataaatgtatacacacttcctatatgtatccacatatatatagtgtatatattatacatgtataggtgtgtatatgtgcatatatacacacatgcacataacaaaatcagatgctcattacaaatccagatgctcattacaaaaccagatgctacacaaacagcagcagaggaaacaaggttggactcttgcaacagatcacaaaaaataaaaacagctacttgcagtgactttggtcatttctgtatgttcataaagaatggattgtaacaaggaaaaaaaggaacagtgttagtgaaaaaggaaaaatgggcgaaaccatcttgatccgatgcgaatgcagtaatgttctatataccatttcatcagttatttcttttagtcatgttgatttgatttcagtttctggctatgaaaaacatttttaaactcgtcacccacaacaaactgaacaaaactactacagtgaaagcccttttcagtgaaagatgtcagaaacctcaaaacctttggcctgactcagaactaccatgtgaaaatcagtactctcttaatgtttgaaataaaaactgaaaaaaaaaaaaaaaaa

SEQ ID NO: 40 - DNA, 3935 bp, Homo sapiens
ggcacagtgtttttgaaatgttggagcagaacttatatgattttctaaagcaaaacaaatttagcccactgccactcaagtacatcagaccaatcttgcagcaggtggccacagccttgatgaagctcaagagtcttggtctgatccacgctgaccttaagcctgaaaacatcatgctggttgatccagttcgccagccctaccgagtgaaggtcattgactttggttctgctagtcacgtttccaaagctgtgtgctcaacctacttacagtcacgttactacagagctcctgaaattattcttgggttaccattttgtgaagctattgatatgtggtcactgggctgtgtgatagctgagctgttcctgggatggcctctttatcctggtgcttcagaatatgatcagattcgttatatttcacaaacacaaggcttgccagctgaatatcttctcagtgccggaacaaaaacaaccaggtttttcaacagagatcctaatttggggtacccactgtggaggcttaagacacctgaagaacatgaactggagactggaataaaatcaaaagaagctcggaagtacatttttaattgcttagatgacatggctcaggtgaatatgtctacagacctggagggaacagacatgttggcagagaaggcagaccgaagagaatacattgatctgttaaagaaaatgctcacaattgatgcagataagagaattacccctctaaaaactcttaaccatcagtttgtgacaatgactcaccttttggattttccacatagcaatcatgttaagtcttgttttcagaacatggagatctgcaagcggagggttcacatgtatgatacagtgagtcagatcaagagtcccttcactacacatgttgccccaaatacaagcacaaatctaaccatgagcttcagcaatcagctcaatacagtgcacaatcaggccagtgttctagcttccagttctactgcagcagctgctactctttctctggctaattcagatgtctcactactaaactaccagtcagctttgtacccatcatctgctgcaccagttcctggagttgcccagcagggtgtttccttgcagcctggaaccacccagatttgcactcagacagatccattccaacagacatttatagtatgtccacctgcgtttcaaactggactacaagcaacaacaaagcattctggattccctgtgaggatggataatgctgtaccgattgtaccccaggcaccagctgctcagccactacagattcagtcaggagttctcacgcagggaagctgtacaccactaatggtagcaactctccaccctcaagtagccaccatcacaccgcagkatgcggtgccctttactctgagctgcgcagcysgccggccggckctggttgaacagactgccgctgtactgcaggcgtggcctggagggactcagcaaattctcctgccttcaacttggcaacagttgcctggggtagctctacacaactctgtccagcccacagcaatgattccagaggccatggggagtggacagcagctagctgactggaggaatgcccactctcatggcaaccagtacagcactatcatgcagcagccatccttgctgactaaccatgtgacattggccactgctcagcctctgaatgttggtgttgcccatgttgtcagacaacaacaatccagttccctcccttcgaagaagaataagcagtcagctccagtctcttccaagtcctctctagatgttctgccttcccaagtctattctctggttgggagcagtcccctccgcaccacatcttcttataattccttggtccctgtccaagatcagcatcagcccatcatcattccagatactcccagccctcctgtgagtgtcatcactatccgaagtgacactgatgaggaagaggacaacaaatacaagcccagtagctctggactgaagccaaggtctaatgtcatcagttatgtcactgtcaatgattctccagactctgactcttctttgagcagcccttattccactgataccctgagtgctctccgaggcaatagtggatccgttttggaggggcctggcagagttgtggcagatggcactggcacccgcactatcattgtgcctccactgaaaactcagcttggtgactgcactgtagcaacccaggcctcaggtctcctgagcaataagactaagccagtcgcttcagtgagtgggcagtcatctggatgctgtatcacccccacagggtatcgagctcaacgcggggggaccagtgcagcacaaccactcaatcttagccagaaccagcagtcatcggcggctccaacctcacaggagagaagcagcaacccagccccccgcaggcagcaggyrtttgtggcccctctctcccaagccccctacaccttccagcatggcagcccgctacactcgacagggcacccacaccttgccccggcccctgctcacctgccaagccaggctcatctgtatacgtatgctgccccgacttctgctgctgcactgggctcaaccagctccattgctcatcttttctccccacagggttcctcaaggcatgctgcagcctataccactcaccctagcactttggtgcaccaggtccctgtcagtgttgggcccagcctcctcacttctgccagcgtggcccctgctcagtaccaacaccagtttgccacccaatcctacattgggtcttcccgaggctcaacaatttacactggatacccgctgagtcctaccaagatcagccagtattcctacttatagttggtgagcatgagggaggaggaatcatggctaccttctcctggccctgcgttcttaatattgggctatggagagatcctcctttaccctcttgaaatttcttagccagcaacttgttctgcaggggcccactgaagcagaaggtttttctctgggggaacctgtctcagtgttgactgcattgttgtagtcttcccaaagtttgccctatttttaaattcattatttttgtgacagtaattttggtacttggaagagttcagatgcccatcttctgcagttaccaaggaagagagattgttctgaagttaccctctgaaaaatattttgtctctctgacttgatttctataaatgcttttaaaaacaagtgaagcccctctttatttcattttgtgttattgtgattgctggtcaggaaaaatgctgatagaaggagttgaaatctgatgacaaaaaaaraaaaattactttttgtttgtttataaactcagacttgcctattttattttaaaagcggcttacacaatctcccttttgtttattggacatttaaacttacagagtttcagttttgttttaatgtcatattatacttaatgggcaattgttatttttgcaaaactggttacgtattactctgtgttactattgagattctctcaattgctcctgtgtttgttataaagtagtgtttaaaaggcagctcaccatttgctggtamcttaatgtgrgagaatccmtatctgcgtgaaaacaccaagtattctttttaaatgaagcaccatgrattcttttttaaattattttttaaaagtctttctctctctgattcagcttaaatttttttatcgaaaaagccattaaggtggttattattacatggtggtggtggttttattatatgcaaaatctctgtctattatgagatactggcattgatgagctttgcctaaagattagtatgaattttcagtaatacacctctgttttgctcatctctcccttctgtyttatgtgatttgtttggggagaaagctaaaaaaacctgaaaccagataagaacatttcctgtggtaatagcctttaatac

SEQ ID NO: 41 - DNA, 2768 bp, Homo sapiens
acttatctcaggaaaggaaaatatgcatggttggtgagaatctaataacattaaaatgctggggcaagatgcagtacaaagttgaagagactttattctcaataagttgatttactgatgatatgtcatatgatgcaaaaaaggttttgtgtcattaactgaaaagtagcagcttctctatccaggatgatgagtcaacaggtttcactaatatttgtcatgctgtagcatttgtaagatttgtaaatgatgaaattcaaagaaaactttttctattgctaggagcctgccagaacaaaggccaatatataatgttgtgacatcatatctgataaccagaggtctggtatctacactcctggtgccccatcagtggttgtctccataagtcattttgcgttattaaaaaaaaaaaaagaaatcctgatgttgacattatagcacactgctttctccacagagatgctgatatcaaaaacttgaagatacagtgaagttctgaataatgttacaaaactggttacctgtatcaaagacccatttatgcaaaaatgttaaaaaaaaaaaaaaacacccaaaacaaaaacctggacagacagcacataaacctcctgcaccatacagacatccagtggcttctcagaggaagcgttctctacaggatatttgaattgaaaggtgaattgccagagtacttacaataaaacagccagcttttgctgagtgctttggaaatgaaaaatgactacagaaagtagcctattttgcagacgtttttcatcacatgaacaaatggacaagtctctgaaaggttctggggaaaaaaatttttcttaaagcgacaagactcttagatctaaaaggaaactgacttgccaccttgccagaggaattcttgaaatgtttctgcagccacttggccttgaaaataaagggtgcaactctcaartcttgktctaacccggctggaggaaccacaagacccaatgaaatagcattttctctccttttcccagcactagtatataacctatgaggaacccttgtctctgaatctgctcagcttgaaattttgtctctgaaagaagttggtgacattaaggcatctacagagatgaggttaagaagattccagtcagtggaaagtggagcaaataacgttgtcttcatcaggacacttgggatagagcctgagaaattggtgcatcatattctccaggatatgtacaaaaccaagaaaaagaagactcgagttattttgcgaatgttacccatctcaggcacatgcaaggcttttttagaagatatgaaaaaatatgcagaaacatttttggaaccctggtttaaagctccaaacaaagggacatttcagattgtgtacaaatctcgaaataacagtcatgtgaatagagaagaagttatcagagaattggcaggaatagtgtgcaccctcaattcagaaaataaagtggatctcaccaatccacagtacacagtggtagtagaaatcatcaaagctgtctgttgcctgagtgttgtgaaagattacatgttgtttagaaaatacaatctccaggaggtggtgaagagccctaaggatccgtcacagcttaactcaaagcagggaaatgggaaagaagctaaactggaatctgcggacaaatcagaccaaaacaacacagcagaaggaaaaaataaccagcaggtaccagagaatactgaggagctggggcagacaaaaccaacgtctaatccacaggtggtaaatgagggaggagccaaacctgaacttgcaagtcaagccacagaaggatccaagtcaaatgaaaatgacttctcataggaagtcatttggtgttrkagctgacagtccagtgtcgcaattttggaaggcaagatgtgagagagacgagaaccattttaggcatagaactacagacatttctgaaaaggttggtgatgaagaacttcagtcttctgagtatacttcagtatactagtgcaacaagggacacaaagaaattctgtcttaataaagaaagctacttctcaagggtattatgtggactcagtccaagctctcctgtcccattgtgcattgtctgtgacatgcaacttacaaaactagcaattgtaacaataaatcacagccacttgacaagaaaggatattcattattttcaaatggcttttggactatcaaaaacagtaaggcttttgttcagaaatcacctttagtcaaaaggtttaagaagcaaattatttagtagcagaacttatctcaggaaaggaaaatatgcatggttggtgagaatctaataacattaaaatgctggggcaagatgcagtacaaagttgaagagactttattctcaataagttgatttactgatgatatgtcatatgatgcaaaaaaggttttgtgtcattaactgaaaagtagcagcttctctatccaggatgatgagtcaacaggtttcactaatatttgtcatgctgtagcatttgtaagatttgtaaatgatgaaattcaaagaaaactttttctattgctaggagcctgccagaacaaaggccaatatataatgttgtgacatcatatctgataaccagaggtctggtatctacactcctggtgccccatcagtggttgtctccataagtcattttgcgttattaaaaaaaaaaaaaaaagggcggccgctctagaggatccaagcttacgtacgcgtgcatgcgacgtcatagctcttctatagtgtcaccta

SEQ ID NO: 42 - DNA, 357 bp, Homo sapiens
ggcacgagcagagcagcaagtgctccgtgcagggctgttgctatcacttggaggtgaacagcctcttttgccggtattcagtgaagaaagcaagtctaaatatgcagttctctcactggagtgaaagatgttttgttcatttckaatcaactatgctagacagctgcactatasaagtgcctgcaatttgccatttatttgtaataagaaaataataaacactgctggaaccagtaatgcagaagtccccttggctgatcccggaatgtaccagctggrcattacattaagaaggggtcaaagtttagctgctcgagatcgagkwgggacgagkgatccatatgtgaagtttaaaat

SEQ ID NO: 43 - DNA, 483 bp, Homo sapiens
  SITE (399): n equals a,t,g, or c
ggcacgagcctgcttgaagcctaactgtccaccagaaaggactgctctttgggtgagttgaacttcttccattatagaaagaattgaaggctgagaaactcagcykctatcatgtggaacagctctgacgccaacttctcctgctaccatgagtctgtgctgggctatcgttatgttgcagttagctggggggtggtggtggctgtgacaggcaccgtgggcaatgtgctcaccctactggccttggccatccagcccaagctccgtacccgattcaacctgctcatagccaacctcacactggctgatctcctctactgcacgctccttcagcccttctctgtggacacctacctccacctgcamtggcgcacggtgccaccttctgcagggtatttnggctcctcctttttgcctccaattctgtctccatcctgaccctctgctcatcgcactgggacgctaactcctcattgcccaacc

SEQ ID NO: 44 - DNA, 894 bp, Homo sapiens
ccacgcgtccgggcccaagggggagcgagccggtgctgctgcaggctgaggctgcggcagaggcggcgaggcgcgggcggtgaggacggacagtcaccgacttagtccagttccctgtgatctcaaaacaattgttgcagcaggctcctggcagtctcaagcagttcatcttcttggtgtactggtttcctattgtgattttatcatggaaaatcaattggctaaatcaactgaagaacgaacatttcagtaccaggattctcttccatcactgcctgttccttcacttgaagaatcattaaaaaaataccttgaatcagtgaaaccatttgcaaatcaagaagaatataagaaaactgaagaaatagttcaaaaatttcaaagtgggattggagaaaaattgcaccagaaattgcttgaaagagcaaaaggaaaaagaaattggctggaagagtggtggctgaatgttgcctatctggatgttcgtataccatcacaattgaatgtcaactttgcgggtcctgcagctcattttgaacactactggcctccaaaggaagggactcaattagaaagaggaagtataactctttggcataacttgaactactggcagctattaagaaaagaaaaagtgcctgttcataaagttggaaatactcctctagatatgaatcaattccgaatgctattttctacctgcaaggttccaggaattactagagactccagcctgggtgacagagcaagacgctgtctcaaaaaaaaaaaaaacaaaaaaaaaaaacaaaaaaaaaaaaaaaaaaaaaaaaaaaaaaaaaaaaaaaaaaaaaaaaaaaaaaaaaaaaaaaaaaaaaaaaaaaaaaaaaaaaaaaaaaaaaaaaaaaaaaaaaa

SEQ ID NO: 45 - DNA, 550 bp, Homo sapiens
gaattcggcacgaggctgggcattgggagcatgctggggaacacasggccatcctcacccctctgacagacagcaagatcatctccagccacctgcccaaggaggccatctcaggtctggtgtgccttgtcaactgtgccattggcatggtgttcacgatggaggctgggaactactggtttgacatattcaacgactacgcggccacactgtccctgctgctcatcgtgctggtggagacgattgccgtgtgctacgtgtacgggctgaggagatttgaaagtgaccttaaggccatgaccggccgagctgtgagctggtactggaaggtgatgtgggctggcgtaaccactgctgattgtmagcctctttgtcttctacctgagcgactacatcctcacggggaccctgaagtatcaagcctgggacgcctcccagggccagctcgtgaccaaarattacccggcctatgcactggctgtcatcgggctgcttgtggcctcctccaccatgtgcatccccctggcggccctggggacttttgttcagc

SEQ ID NO: 46 - DNA, 838 bp, Homo sapiens
gggtcgacccacgcgtccgagctggtggcctgtccccgcctggtgggggctggggctgctgcgggagagtcctgtcctgatgctccccgcgccccccaaacatcgtcccagaggacagcagccaaagagcctcctggctcagagccgtcagctttcgcgttcctgaacgcctgacccgatggcctggccctggagtcttcagcttcagctgctgtctggggcggtctgtgcttcctgagcagcctcaaccgtagctgctacagtctccaggcagcttgacttgagaggacgaccctagggctacctcagtttcccccatctcctctgccagaggctctggctatttggacttgaatccctacgagggatggcaggtggcagggcttcagaaatgtcgatctcagggctctcagggggcagtccctgcctgtcttgccctcagacatgaggtttcttgtatgaatgcggaagcgactaccaggttccttatttcattttgatctcagctccctccttccccaggaggtcatgagcagcaacaagccactgctcccccgtcccatcggggtgggctaggtgctgaggctgggtttggtgcatgtgggttgagggtgtcttgtccgggctgccttgtgctgtctggcctgaggccatttcaagtctcagatccctacgtgatccttccctggctctcacctgctcctttaggctgtaattgcttcctacacacgaagcctctgattggagcctctggtccatctcagaaaaaccttccaagagcgctggggtttatgctttctgaataaacactactgtttacatgaaaaaaaaaaaaaaa

SEQ ID NO: 47 - DNA, 1912 bp, Homo sapiens
tttaagttcttcatggagcagcacgtggagaatgtcatcaaaacctaccagcagaaggttaaccggaggctgcagctggagcaagaaatggccaaagctggactctgtgaagctgagcaggagcagatgcggaagatcctctaccagaaagagtctaattacaacaggttaaagagggccaagatggacaagtctatgtttgtcaagatcaaaaccctggggatcggtgcctttggagaagtgtgccttgcttgtaaggtggacactcacgccctgtacgccatgaagaccctaaggaaaaaggatgtcctgaaccggaatcaggtggcccacgtcaaggccgagagggacatcctggccgaggcagacaatgagtgggtggtcaaactctactactccttccaagacaaagacagcctgtactttgtgatggactacatccctggtggggacatgatgagcctgctgatccggatggaggtcttccctgagcacctggcccggttctacatcgcagagctgactttggccattgagagtgtccacaagatgggcttcatccaccgagacatcaagcctgataacattttgatagatctggatggtcacattaaactcacagatttcggcctctgcactgggttcaggtggactcacaattccaaatattaccagaaagggagccatgtcagacaggacagcatggagcccagcgacctctgggatgatgtgtctaactgtcggtgtggggacaggctgaagaccctagagcagagggcgcggaagcagcaccagaggtgcctggcacattcactggtggggactccaaactacatcgcacccgaggtgctcctccgcaaagggtacactcaactctgtgactggtggagtgttggagtgattctcttcgagatgctggtggggcagccgccctttttggcacctactcccacagaaacccagctgaaggtgatcaactgggagaacacgctccacattccagcccaggtgaagctgagccctgaggccagggacctcatcaccaagctgtgctgctccgcagaccaccgcctggggcggaatggggccgatgacctgaaggcccaccccttcttcagcgccattgacttctccagtgacatccggaagcagccagccccctacgttcccaccatcagccaccccatggacacctcgaatttcgaccccgtagatgaagaaagcccttggaacgatgccagcgaaggtagcaccaaggcctgggacacactcacctcgcccaataacaagcatcctgagcacgcattttacgaattcaccttccgaaggttctttgatgacaatggctacccctttcgatgcccaaagccttcaggagcagaagcttcacaggctgagagctcagatttagaaagctctgatctggtggatcagactgaaggctgccagcctgtgtacgtgtagatgggggccaggcacccccaccactcgctgcctcccaggtcagggtcccggagccggtgccctcacaggccaatagggaagccgagggctgttttgttttaaattagtccgtcgattacttcacttgaaattctgctcttcaccaagaaaacccaaacaggacacttttgaaaacaggactcagcatcgctttcaataggcttttcaggaccttcactgcattaaaacaatatttttgaaaatttagtacagtttagaaagagcacttattttgtttatatccattttttcttactaaattatagggattaactttgacaaatcatgctgctgttattttctacatttgtattttatccatagcacttattcacatttaggaaaagacataaaaactgaagaacattgatgagaaatctctgtgcaataatgtaaaaaaaaaaaaaaa

SEQ ID NO: 48 - DNA, 1448 bp, Homo sapiens
  SITE (2): n equals a,t,g, or c
  SITE (5): n equals a,t,g, or c
  SITE (12): n equals a,t,g, or c
  SITE (22): n equals a,t,g, or c
anacngacagtnacggatcggnattcccgggtcgacccacgcgtccggaaattctatttgaagaataccagtttcaagcagtattaagagtaaatgctggggctctcagtgcacataggtatttccgagataatccttccgaattatgctgtatcattgttgatagtggatattcctttacacatatagttccttattgtagaagtaaaaagaaaaaagaagcaattattcggataaatgtgggaggaaaactcttaaccaatcatctaaaggagatcatatcttacaggcagctacatgttatggatgaaacacatgtgattaatcaagtgaaagaagatgtatgctatgtgtctcaggatttttatagagacatggatattgcaaagttgaaaggagaagaaaatacagtaatgatagactatgtcttgcctgacttcagtacaattaaaaagggcttttgtaagccaagggaagagatggtgttgagtggaaaatacaaatctggggaacaaattcttcgtttggccaatgagagatttgctgttccggaaatactctttaatccttctgatataggcattcaagaaatgggaattccagaagctattgtctattcaattcaaaatctacctgaagaaatgcagccgcatttttttaagaacattgtcttgacaggaggaaattcccttttcccaggatttagggatcgggtttactcagaagttcgatgtcttactccaacagattatgatgtttctgttgtgctgcctgaaaaccctattacttatgcctgggaaggtggaaaattgatatcagagaatgatgattttgaagatatggtggtaacaagagaagattacgaagaaaatggacatagcgtctgtgaagagaaatttgatatttaagcaacatttttgaatgaaagttgtgaccataaggtttaatttcaaagttccttttaaaagaggttaaggaactgtgttaccttttgtcctaagaaaaaggcttgaatttatgtaaatactttgatcgattgctaattttcaaaggcttcttaggtaggttactacagtaaactgtaactcagtccacattttcatttaggagctagactaccataacaatgcttatgctgtttccaagggtaggttatttttcattaaaagaagaatgaatgcattttaagtttaattcttcatagctgaaagcacaaatttaacggcttcactggacagttttccttagaaggtagttttgtgtgactgtgactaaactattttattttaaaatgtcattcttatttatacattctaaagttggaaagactgatcttatatgtgtataatgtttattttgtacctagagtacatttaaaagggtggagactaagctaataaagtttttttggccactaaaaaaaaaaaaaaaaaaaaaaaaaaaaaaaa

SEQ ID NO: 49 - DNA, 892 bp, Homo sapiens
ggcacgaggccagcttcacgccacccgggatgggagaaagcaggtgtcgcgagagttgggcgcaagacgccttgtagggagtgtaactatggccggcctgcggaacgaaagtgaacaggagccgctcttaggcgacacacctggaagcagagaatgggacattttagagactgaagagcattataagagccgatggagatctattaggattttatatcttactatgtttctcagcagtgtagggttttctgtagtgatgatgtccatatggccatatctccaaaagattgatccgacagctgatacaagttttttgggctgggttattgcttcatatagtcttggccaaatggtagcttcacctatatttggtttatggtctaattatagaccaagaaaagagcctcttattgtctccatcttgatttccgtggcagccaactgcctctatgcatatctccacatcccagcttctcataataaatactacatgctggttgctcgtggattgttgggaattggagcaggtaaggttgtatgtatatgtttggttgtgtcatattcacattcattctgacatttatggctcacttttaactggtctcatccccttttaaactcatatttcacagttcaacatacatgtttctcattgtaaacaaatatttttcttatcattttgcctttgctcatgatgttctcattacctatagtttctcttctgttctcatcattcttcatccttcaagattcagtttaaaccaggtgtggtggcacgtgcctatggtaccagctactcgggagactgaggtagcagaatctcttgagcccaggagttcgaggccagcctgggtaacatagggagacctccatctaaaaaaaaaaaaaaaaa

SEQ ID NO: 50 - DNA, 1207 bp, Homo sapiens
  SITE (36): n equals a,t,g, or c
  SITE (713): n equals a,t,g, or c
  SITE (988): n equals a,t,g, or c
ctttagggcgaattgggtactgggccccccctcganttttttttttttttttttttttttttttttttaaaactgagaattttcatcttagtttttatttcttttataacatatttgctttaaaattttcttacaaaatttattaaaaagacatacaaacaacatatgggagatgagaataagattcctctaatacaaaggcattagggtaaataatatttcaggtgctagacagcaggcatggcacatttattcaccaagaccagaatccctgggggtaatcgcttccgttttttccagcccactattattagttgtgagaagtaatttgcttgacttgctttcattctctgactccagttttgcagcctcctcccaagtagttgctagccgtttcccaagggtttctggaagctttagtgttaacactccactcaggagggccatagtcccaacaaacaactgtggtatgaagatccaaatgctgctgaggtccacagagaacggcgccaggatgctggccaggcgacacaccatgctgccgcttcccacagccagcgatcttacaatggttggatacagctcagctgtataaagataaatgaggccaaatgctgccccgatggcaaattttccaaccatagctgtcaccacacccaaaatataatgtttctgggggatcaccataacgacaccacaggccagtgcactgncagaaaagagagtaggccaggactgttctcctcccgaccttgtcccatggcgatgcacacgaaggtgtaggcgggaatttccactacacccaggaggaagaggtttaagtattcattgcctcctaagttaacagaattcaaggaaaacgagtagaatcccaaacttccagtgaaccagattagccaaacggtaagtgtccttttcgtaatgctccagttataaaacagatatgataggttgtgcttctgaacttcagtggggctattactaacangaccttgtaggtccagtgataaaagttctgacagtttacaggagcttgccctgttccacttggccatgatgtcaactatttttttgtgcttcttcatatcgtccctctgagagaagccaaaaaggtgtctctgggagcacccaacagcacaggataaaggggacagtcactgtggagaggatcatctggtaaagccaccaggtcctgaccaagtatccc

SEQ ID NO: 51 - DNA, 724 bp, Homo sapiens
  SITE (546): n equals a,t,g, or c
  SITE (558): n equals a,t,g, or c
  SITE (611): n equals a,t,g, or c
  SITE (613): n equals a,t,g, or c
  SITE (663): n equals a,t,g, or c
  SITE (672): n equals a,t,g, or c
  SITE (715): n equals a,t,g, or c
ggctcagttctctgggttgaggcatcatcaccctggtggccatgtggaggatggactggaaaaggcattcagttagaagacctctgcaggagtccaaggaagaaacaggcaaatctgcaggaggcagattgcagccttcttcgctgagtctctgcccagtgtgggagggcagatcattccccctgctggctacttctcccaagtggcagagcacatccgcaaggccggaggggtctttgttgcagatgagatccaggttggctttggccgggtaggcaagcacttctgggccttccagctccagggaaaagacttcgtccctgacatcgtcaccatgggcaagtccattggcaacggccaccctgttgcctgcgtggccgcaacccagcctgtggcgagggcatttgaagccaccggcgttgagtacttcaacacgtttgggggcagcccagtgtcctgcgctgtggggctggccgtcctgaatgtcttggagaaggagcagctccaggatcatgccaccagtgtaggcagcttctgatgcagctnctcgggcagcanaaaatcaaacatcccatcgtcggggatgtcaggggtggtggctcttcattggngnggatctgatcaaagatgaggccacaaggacaccagcaactgaaaagctgnctacttggnatcaaaggctgaaggaggaactacgttttgcttgacacttganggcccttgg

SEQ ID NO: 52 - DNA, 1844 bp, Homo sapiens
gcacaagtgtgcatgtgtggctcggaggcttcagctggggccccgccctcgtccccaggcgcacactgacacacgcagcccagacccggcccgagcgggctcctgccctcggcgtggcttctctccagccgggagtcccagggccagctagcctcctcccctaaaggggacggcctgtcagcgcagtgccagagtccagcaccgggaggaaagtttcggagtgcggagggagttggggccgccggaggagaagagtctccactcctagtttgttctgccgtcgccgcgtcccagggaccccttgtcccgaagcgcacggcagcgggggggacttcagccctccaggcggggtgggttccaggtccgggtccgaggcgggcgctggaggctcggccccaggccggagaggaactcctttcgcgagctgtcgccgtgggcccgcattgtctgcaggaactctccggaatcgggagggggaggactggatcgcgcttccactgggattcgtcaagagttccggcggcarctgcggcggtggcggagactccctttgtcctctcaggacctccctctctccctccctgtcagctggtgggtcccgctgccgcaggcgccggcgtctcagctgctcgccgccccccaccccagagtgcgtgccgggtgactcccgccacctttgcgaccctcctgagcttaggggactgcgagcgggagggagtctcaggcccccggccgcaggatggtggcggagcggtccccggcccgcagccccgggagctggctgttccccgggctgtggctgttggtgctcagcggtcccggggggctgctgcgcgcccaggagcagccctcctgcagaagagcctttgatctctacttcgtcctggacaagtctgggagtgtggcaaataactggattgaaatttataatttcgtacagcaacttgcggagagatttgtgagccctgaaatgagattatctttcattgtgttttcttctcaagcaactattattttgccattaactggagacaggttagtgcattatcatttcactgcaggcttttagtagagatgaattttaaaggcatgattgatatttccaagtggtgattcaggcctctcagtggaatcaagcagatgcacagacaattcagktctctaatagaagggaaaggaggyatgagtaatataaaagagcagytaatctgaaaatcaatatcatttatagtggctgtggaatgtgcagtgcaaatctagatccctgtcttagttgtatattcaccacttcctaccttccccggcctctctgttactgtaagtagttctacatttttcttgtttagatataatatattaatcaaccaggaatttgaagaacattgagggggagaaagatatgkatccttttggataatttcctagattcagtagacatcctggatttctggtctttctctgaggtccattaatgctgaatatattcacctttataagggaacttagtatatatcaatatgtataccaatatatctctatatctatctacctatctatttaatctccttagtgttttttaaaaggtgtctttttcagaccaatgtcacagtatttcatatgaccatttctgtgtcattcaaacagtgtcaatgacaagttasaaatagtcattgatatattttatgttatttttattttttgagacagagtctctctctgttgcccaggctggagtgcagtggtgctatcttggctcactgcagsccccacctcccaggttcaagcaattctcatgcttcacgctcccgagtagctgggattataggcacatgccaccacacctg

SEQ ID NO: 53 - DNA, 1230 bp, Homo sapiens
ggcacgaggttttttgttccaagagagaagtgaagaatgtagttttcaaccaaagggatgacagctgatgagtgggctgagaaaatgcccaaaggcccgccgcctacctctcccaaggccacagccgacagagacatcctggctcgcctccacaaagcagtgacttcccattaccatgccatcacccaggagtttgagaattttgacaccatgaaaacgaacaccatctccagagaggagtttagggccatttgtaatcgccgcgtccaaatcctgacggacgaacagtttgacagactctggaacgagatgccagtcaatgccaaggggaggctgaaatacccggacttcctgagcaggttcagttccgagacagcagccacaccaatggccactggtgactcggccgtggcccagagagggagcagtgtccctgacgtctcggaaggcaccagatctgccctctcattgcccactcaggagctgagaccagggtcaaagtcgcagagccacccctgtactccagcgagcaccaccgtgatcccgggcactccacccttgcagaactgtgatcccatagagagcaggctccggaagagaatccagggctgctggcgccagctcctgaaagaatgcaaggagaaggacgtggccagacagggggacatcaacgcctccgatttcctggctcttgtggagaaattcaacctggacataagcaaagaggagtgtcagcagctcattataaaatacgacttaaagagcaacgggaaatttgcatactgtgacttcattcagagctgtgtcctcctgctaaaagcaaaggaaagctcactgatgcacaggatgaagatccagaatgcacacaagatgaaagaagccggcgcggagacgccatctttttactctgctctgctgcgtattcagcccaaaattgtgcactgctggaggccaatgcggcgcacgttcaaaagctatgatgaggctggaacagggctgctaagcgtcgcagatttcaggacggtcctgagacagtacagcatcaacctctctgaggaagagttcttccatattctggagtattacgataagacgctgtcttcaaaaatctcctacaacgacttcctccgggcattcctccagtagacacccctgctgtgtgcccagcgggacgacagccacagggcctgtttcaaggctaataaaatcctataatttgaaaaaaaaaaa

SEQ ID NO: 54 - DNA, 1303 bp, Homo sapiens
  SITE (1265): n equals a,t,g, or c
  SITE (1267): n equals a,t,g, or c
ttttttttttttttttttttttttttttttacaattgcaaagattttatttagcggctttctgtgcttggcacttagaaacagagttccgtgcataagggcaaatttttgtacaccttttcttcatacatattttacatacccttttattgccccctttttcatattcataatattggattccccactaggcacataaatacatttatctacaacacctcaaaaccagaaactttaataatatctgtattattttacttggtattatttgcatttccacaccatttaaaaattttagcttgcaccaagcttcacttgctttcttaccattaaaagatttgaagggaaagggaaagatgaaggacaaaacccaaaacttcaaaatgcaatgtactatttgataaaaatggagatctaagggcaggtagaagggtatagaagacccatctgcaattccctgggacatgaggggatatttcctgccacagggatagcgggcaggcattytaggtcaggtgtctggatccggcacmtggaggccaggcctctatttgttgcctctgctcttggtatcatcttccgagattataaaactattccttcttcacacccttttattttccttcccctaccaggctgcatgctgtggaatcagcacttcccacgtagtgcacctctcttctggatcacagtggtcaaagctgtgggctcaggatgcattccttgctctgtccytctgaccaatgccctgaccatgytcagtgtgccagagaggtttaytcytcagtaatgccatgattctttccataacctgtagtggggcgggcggggtttggggggacaaaccaaaaacacgtctccttggtgaattaaaattctcatcattgctcacactttctctgtcagtcttgctctccacctcgttcctgttctctattctttctgtttgtctttctcctgttcagcttctctttctccctctttccacgggcaccactgggaatatcaatgatagcatacaagtgaagagagccaaagttcaaaagcaatctttttccggaagccaagtccagttgtactgatgtctttccactctcatccattgggagggtctccaggatacatggttcattccagaagcagaggaagctgcaggggagaaagactggcagctactgctggcccactccatctagagttgtacacagacaaattcttggtgaaagcacccattctgggcctccctccacagagttcacccagttnanagtcagtgtgcatgtatgattgcatgtgtatgaatt

SEQ ID NO: 55 - DNA, 1589 bp, Homo sapiens
gatttccagcttaatcatcacctgatgaacaaaaataatgactaaacctaatcatgagcttagcccggcgctgatcgtgctgatgtctatcgccaccggtctggcggtagccagtaactattacgcccagccattgctcgacaccatcgcgcgtaacttttccctttccgccagttcggcaggctttattgttaccgccgcgcagttgggctatgccgcagtctactgtttcttgttcccctcggtgatatgtttgaacgccgccgcctgattgtctcgatgaccttactggcggcatgttgattaccgccagcagtcagtcgctggcgatgatgatcctcggtacggcattaaccggtttattctcagtcgtggcacaaattctggttccgctggcagcgacgctggcttcaaccggataaacgcggcaaagtggttggcactattatgagcggtctgctgttggggatcttgctggcacggacagttgccggattgctggcgaatctcggcggctggcgcaccgtcttttgggttgcttcggtgttaatggcactgatggcgctggcattatggcgtggtctgccacaaatgaaatcagaaacccacctcaactacccacagttgttgggttccgttttcagtatgtttatcagcgataaaattctgcgtacccgcgcgttgctgggctgcctgacctttgccaatttcagcattctctggacctcaatggcctttttgcttgccgctccaccttttaactacagcgatggtgtcattggtctgtttggacttgcgggagctgccggagcgttgggcgctcgtccggcgggcggttttgccgataagggcaaatcgcaccacaccacaactttcggtctgctgctgctattactttcatggctggcgatctggtttggtcacacttccgtactggcgttgattatcggaatcctggtgctggatctcaccgtgcagggcgtgcatatcactaaccagacggtaatttatcggatacatcctgatgcgcgcaatcgcctgaccgcaggttacatgactagctactttattggcggtgccgccggttcgctaatttcagcctcagcctggcaacatggcggttgggctggcgttgtctggttggcgcgacgattgccctgcttaacttactggtctggtggcgaggttttcatcgtcaggaagccgcaaattaagcaatcagcaaccgttttcgtggctttacacttataagggtgttaagaagcccatcagtctgataaggttaagatattcattcagtctatttataatattaacaatcgttaagcgtacactctatggaaagccctactccacagcctgctcctggttcggcgaccttcatggaaggatgcaaagacagtttaccgattgttattagttatattccggtggcctttgcgttcggtctgaatgcgacccgtctgggattctctcctctcgaaagcgtttttttctcctgcatcatttatgcaggcgcgagccagttcgtcattaccgcgatgctggcagccgggagtagtttgtggattgctgcactgaccgtcatg

SEQ ID NO: 56 - DNA, 600 bp, Homo sapiens
aattcggcacgagtgactcatcctcctggaaagaaatttcaagggataaagcaccatggatctaacttatattcccgaagacctatccagttgtccaaaatttgtaaataaatcctgtcctcccaccaaccgctcttttcatgtccaggtgataatgtattcggttatgactggagccatgattatcactattcggaaacttggttataatggtttccatatcgcatttcaaacagcttcactctcccacaaactttctgatcctctccatggcaaccacggactttctgctgggttttgtcattatgccatacagcataatgcgatcagtggagagttgctggtactttggggatggcttttgtaaattccacacaagctttgacatgatgctcagactgacctccattttccacctctgttccattgctattgaccgattttatgccgtgtgttaccctttacattacacaaccaaaatgacgaactccaccataaagcaactgctggcattttgctggtcagttcctgctcttttttcttttggtttaggtgttttttcactgccccctttgtgttttcaggcacatggctgatgac

SEQ ID NO: 57 - DNA, 477 bp, Homo sapiens
  SITE (452): n equals a,t,g, or c
gcacgagaaaaattgtgtctgtctttcttccttaaacaatacagtataacagtaatttgcatagcatttacattaggcattttgtgtagcattgtattaggtataagtaatctagaaatgatttaaattatacaggaggatgtgcataggttatatgcaaatactaggacatttcatatcaaggacttgagcatctgcatgcagattttggtatccatcagagttcctggaaccaattcaccacagataccaagggacaactgcacagattaaaaccttaatgcattactaccgtgtacccaccataataactaaaatggaagaaatagaaatgctaggtattggtgacgatatggagcaactggaactcgagtactggygaatatacccatgacctagcattccttccctaggtattttcycaacagaagtgtgtatgcctttttaccacnagacmtatactagaacatttcataa

SEQ ID NO: 58 - DNA, 1164 bp, Homo sapiens
  SITE (1128): n equals a,t,g, or c
gatcttatcagaagctgagcaaaatttctgtggttcctcctactccacctcctgtcagcgagagccagtgcagccgcagtcctggcasgttacaggaatttggtcagtttagaggatttaataagtccgtggaaaatttgtttctgtctcttgctacccacgtgaaaaagctctccaaatcccagaatgatatgacttctgagaagcatcttctcgccacgggccccaggcagtgtgtgggacagacagagagacggagccagtctgacactgcggtcaacgtcaccaccaggaaggtcagtgcaccagatattctgaaacctctcaatcaagaggatcccaaatgctctactaaccctattttgaagcaacagaatctcccatccagtccggcacccagtaccatattctctggaggttttagacacggaagtttaattagcattgacagcacctgtacagagatgggcaattttgacaatgctaatgtcactggagaaatagaatttgccattcattattgcttcaaaacccattctttagaaatatgcatcaaggcctgtaagaaccttgcctatggagaagaaaagaagaaaaagtgcaatccgtatgtgaagacctacctgttgcccgacagatcctcccagggaaagcgcaagactggagtccaaaggaacaccgtggacccgacctttcaggagaccttgaagtatcaggtggcccctgcccagctggtgacccggcagctgcaggtctcggtgtggcatctgggcacgctggcccggagagtgtttcttggagaagtgatcattcctctggccacgtgggactttgaagacagcacaacacagtccttccgctggcatccgctccgggccaaggsggagaaatacgaagacagcgttcctcagagtaatggagagctcacagtccgggstaagctggttytcccttcamggcccagaaaaytccaagaggctcaagaagggacagatcagccatcayttcatggtcaactttgtttggtagtgctaggagccaagaatttacctgtgcggccagatggcaccttgaactcatttgttaaggggtaggtattcgatgtaatcaaatatttattggtgatcnagtatacatcacaacatggcccagaacctgcagcga

SEQ ID NO: 59 - DNA, 2073 bp, Homo sapiens
ggcacgagagccacttcaagctctttacctccatggctgatgtcaccattcagttccagtcggaccccgggacctcagtgctgggctaccagcagggcttcgtcatccacttctttgaggtgccccgcaatgacacatgtccggagctgcctgagatccccaatggctggaagagcccatcgcagcctgagctagtgcacggcaccgtggtcacttaccagtgctaccctggctaccaggtagtgggatccagtgtcctcatgtgccagtgggacctaacttggagtgaggacctgccctcatgccagagggtgacttcctgccacgatcctggagatgtggagcacagccgacgcctcatatccagccccaagtttcccgtgggggccaccgtgcaatatatctgtgaccaggttttgtgctgatgggcagctccatcctcacctgccatgatcgccaggctggcagccccaagtggagtgaccgggcccctaaatgtctcctggaacagctcaagccatgccatggtctcagtgcccctgtttatggtgcccgaagtcctgagaagcagctacacccagcaggggccaccatccacttctcgtgtgcccctggctatgtgctgaagggccaggccagcatcaagtgtgtgcctgggcacccctcgcattggagtgaccccccacccatctgtagggctgcctctctggatgggttctacaacagtcgcagcctggatgttgccaaggcacctgctgcctccagcaccctggatgctgcccacattgcagctgccatcttcttgccactggtggcgatggtgttgttggtaggaggtgtatacttctacttctccaggctccagggaaaaagctccctgcagctgccccgcccccgcccccgcccctacaaccgcattaccatagagtcagcgtttgacaatccaacttacgagactggagagacgagagaatatgaagtctccatctaggtgggggcagtctagggaagtcaactcagacttgcaccacagtccagcagcaaggctccttgcttcctgctgtccctccacctcctgtatataccacctaggaggagatgccaccaagccctcaagaagttgtgcccttccccgcctgcgatgcccaccatggcctattttcttggtgtcattgcccacttggggcccttcattgggcccatgtcagggggcatctacctgtgggaagaacatagctggagcacaagcatcaacagccagcatcctgagcctcctcatgccctggaccagcctggaacacactagcagagcaggagtacctttctccacatgaccaccatcccgccctggcatggcaacctgcagcaggattaacttgaccatggtgggaactgcaccagggtactcctcacagcgccatcaccaatggccaaaactcctctcaacggtgacctctgggtagtcctggcatgccaacatcagcctcttgggaggtctctagttctctaaagttctggacagttctgcctcctgccctgtcccagtggaggcagtaattctaggagatcctaaggggttcagggggaccctacccccacctcaggttgggcttccctgggcactcatgctccacaccaaagcaggacacgccattttccactgaccaccctataccctgaggaaagggagactttcctccgatgtttatttagctgttgcaaacatcttcaccctaatagtccctcctccaattccagccacttgtcaggctctcctcttgaccactgtgttatgggataaggggagggggtgggcatattctggagaggagcagaggtccaaggacccaggaatttggcatggaacaggtggtaggagagccccagggagacgcccaggagctggctgaaagccactttgtacatgtaatgtattatatggggtctgggctccagccagagaacaatcttttatttctgttgtttccttattaaaatggtgtttttggaaaaaaaaaaaaaaaaaaaaaaaaaaaaaaaaaaaaaaaaaaaaaaaaaaaaaaaaaaaaaaaa

SEQ ID NO: 60 - DNA, 451 bp, Homo sapiens
  SITE (307): n equals a,t,g, or c
  SITE (363): n equals a,t,g, or c
  SITE (368): n equals a,t,g, or c
  SITE (392): n equals a,t,g, or c
gaggtgacacaccttctctccctgagagatatccaaaagaactaaatgccatcatggaaagcatgttgaacaagaatccttcattaagaccatctgctatcgaaattttaaaaatcccttaccttgatgagcagctacagaacctaatgtgtagatattcagaaatgactctggaagacaaaaatttggattgtcagaaggaggctgctcatataattaatgccatgcaaaaaaggatccacctgcagactctgagggcactgtcagaagtacagaaaatgacgccaagagaaaggatgcggctgangaagctccaggccggctgatgagaaagccaggaagctgaaaaagattgtggaaganaaatntgaagaaaatagcaaacgaatgcnagaattgagatctcggaactttcagcagctgagtggtgaatgtacttcatgaaaaacac

SEQ ID NO: 61 - DNA, 550 bp, Homo sapiens
  SITE (452): n equals a,t,g, or c
  SITE (503): n equals a,t,g, or c
  SITE (536): n equals a,t,g, or c
cgaactccaactggaaatgcgccttcttctgagtctgacatagacatctccagccccaatgtatctcacgatgagagcattgccaaggacatgtccctgaaggactcaggcagtgatctctctcatcgccccaagcgccgtcgcttccatgaaagctacaacttcaatatgaagtgtcctacaccaggctgtaactctctaggacaccttacaggaaaacatgagagacatttctccatctcaggatgcccactgtatcataacctctcagctgacgaatgcaaggtgagagcacagarccgggataagcagatagaagaaaggatgctgtctcacaggcaagatgacaacaacaggcatgcaaccaggcaccaggcaccaacggagaggcagcttcgatataaggraaaagtggctgaactcaggaagaaaagaaattctggactgagcanagaacagaaagagaaatatatggacacagaccggacctattggaacacacnggaacctcttttaaaaaacctgccagcagtatnacttggatcctttc

SEQ ID NO: 62 - DNA, 295 bp, Homo sapiens
ggcacgaggggagaccttgattataagggcttggctaaggagtttggattttcttctttatagaagtttgaaaagagtcttcgctagttttaacaatgttcatgactgctgattgacagctcttatctgcagtctgcaattctcagaatgaagacattttgagacaaataacagccgcttgctcgtctcactgtttactcctcttgtaagagcactgtatgatgcacatcacacattgagttggatgtgtgatgatgcatcagactgctgccaaaaaaaaaaaaaaaaaaaaaaa

SEQ ID NO: 63 - DNA, 1286 bp, Homo sapiens
ctgcaatgcgccctccccggcagcgacatcagcaattcctattggtgcgcatattgtcagcaaggtacaaacgctgttggcaagccagagtaaccccggacgcacgctgcgagcggcacgtagtgtggatgccttacacgccgcatttaatcaataacctttgaaaacaggatgtagcgatgaaacttaacgacagtaacttattccgccagcaggcgttgattaacggggaatggctggacgccaacaatggtgaagccatcgacgtcaccaatccggcgaacggcgacaagctgggtagcgtgccgaaaatgggcgcggatgaaacccgcgccgctatcgacgccgccaaccgcgccctgcccgcctggcgcgcgctcaccgccaaagaacgcgccaccattctgcgcaactggttcaatttgatgatggagcatcaggacgatttagcgcgcctgatgaccctcgaacagggtaaaccactggccgaagcgaaaggcgaaatcagctacgccgcctcctttattgagtggtttgccgaagaaggcaaacgcatttatggcgacaccattcctggtcatcaggccgataaacgcctgattgttatcaagcagccgattggcgtcaccgcggctatcacgccgtggactccccggcggcgatgataccccgcagagccggtccggcgctggcagcaggctgcaccatggtgctgaagcccgccagtcagacgccgttctctgcgctggcgctggcggagctggcgatccgcgcgggcgttccggctggggtatttaacgtggtcaccggttcggcgggcgcggtcggtaacgaactgaccagtaacccgctggtgcgcaaactgtcgtttaccggttcgaccgaaattggccgccagttttccacttccgtggtggtggtcagttggccgcctttttccatgccggtaatcagcacaggttgcaggttggcgcgcgccgcgtagacagcagcggtgtatcccgccgggcctgaacccaggataagcagtttactgtgtttggtcgtgcccatgagatccccatagttgttggcagacaatgggcaggattgtagggaatttacagacgtaaaaaaagagtatgacgattttgttaacaatttgtgcaatcggcagcatcgataagcaggtcaaattctcccgtcattatcacctctgctacttaaatttcccgctttataagccgattaaatgatgaataaacgcccctgttaatgaatatctggcatgttgtactaaaaatcga

SEQ ID NO: 64 - DNA, 619 bp, Homo sapiens
  SITE (562): n equals a,t,g, or c
  SITE (563): n equals a,t,g, or c
  SITE (569): n equals a,t,g, or c
  SITE (581): n equals a,t,g, or c
  SITE (590): n equals a,t,g, or c
accctcactaaagggaacaaaagctgsmgctccaccgcggtggcggccgctctagaactagtggatccctcgagctgttakcgacwgctgaaacctgggataacggcaaacccattcgcgaaaccagtgctgcggatgtaccgctggcgattgaccatttccgctatttcgcctcgtgtattcgggcgcaggaaggtgggatcagtgaagttgatagcgaaaccgtggcctatcatttccatgaaccgttaggcgtggtggggcagattatcccgtggaacttcccgctgctgatggcgagctggaaaatggctcccgcgctggcggcgggcaactgtgtggtgctgaaacccgcacgtcttaccccgctttctgtactgctgctaatggaaattgtcggtgatttactgccgccgggcgtggtgaacgtggtcaatggcgcaggtggggtaattggcgaatatctggcgacctcgaaacgcatcgccaaagtggcgtttaccggctcaacggaagtgggccaacaaattatgcaatacgcaacgcacaacattattccggnnacgctngagttgggcgcnaagtcgccnaatatctctttgctgatgtgacggatgaa

SEQ ID NO: 65 - DNA, 1616 bp, Homo sapiens
  SITE (1607): n equals a,t,g, or c
ggcccactattggatcgtaaaggcccacgcctgatgctgggactggggatgttcttctggtcactgttccaggcaatgtctggcatggtgcacaactttacgcagttcgtgttggtgcgtatcggtatggggattggtgaagcgccgatgaacccatgcggtgtaaaagtcattaacgactggttcaacatcaaagagcgcggacgcccgatgggcttcttcaacgcagcttctaccattggcgttgccgtaagcccaccgattctggcggcgatgatgctggtgatgggctggcgcgggatgtttattaccattggtgtactggggatttttctcgccatcggctggtatatgctctatcgcaaccgcgagcacgtagaactgactgccgttgagcaagcttatctcaatgcaggtagcgtcaatgcccgccgagatccgctcagttttgccgaatggcgcagcctgttccgtaaccgtacaatgtggggaatgatgctcggattcagtggcatcaactacactgcgtggctgtatctggcctggcttcctggttacctgcaaacagcctataacctggatttaaaaagcacagggttgatggcggctatccctttcctgtttggggctgccgggatgctggtcaacggttacgttaccgactggctggtcaaagggggaatggctccgattaaaagccgtaagatctgcattattgccgggatgttctgttctgccgcctttacgctgatagtaccacaagcgacaacatccatgacggcggttctgctgattggcatggcactgttctgtattcactttgccggaacatcctgctggggcttgatccacgtcgcagttgcttctcgcatgactgcgtcggtgggcagtatccagaactttgccagcttcatctgcgcctcttttgcgccgatcattactggttttattgttgataccacccactcattccgtctggcactaatcatctgcggttgcgtcaccgcagcgggggcactggcgtacatcttcctggttcgtcagccgatcaacgacccacgtaaagattaatctccttatgcccgataacattttgcttatcgggcattttcatggcgattaaaatgtttcccagttctcctcgctatctgccacggccattttacgcggcgcagctggcgtcacggtttttaccacagccgatgtttcacgctgctgttgctgaatccggaacactgccactgcttcggtcaggcgactggcctgctcttccagcgcggcggcggcagcggcagactcttccaccagcgcggcgttctgttgagttacccggtccatctcagcaaccgctaagccaacctgatcgataccacggctctgctcatcagaagcagaagcaatttcgcccataatgtccgtcacgcgggtcacggcgctgacaatctccgccattgtttccccggcgctttcgaccagcgtagagccaacatccactttccccaccgagtcttcaatcaggcttttaatttcactagccgcctgggcgctgcgctgggccasattacgcactwctcccgcgaccaycgcaaaaccgcgcccttgctcancgcacgcgc

SEQ ID NO: 66 - DNA, 1856 bp, Homo sapiens
agcattaactagtgaggagcgaactcgatgggctaaggcacgagaatatctgattggtcttgatccagagaacttggctttgttagaaaaaattcagagtagtttactggtatattccatggaggatagcagtccacatgtaacaccagaggattattctgagattattgcagccatccttattggagatccaacagtacgctggggtgacaaatcctataacttgatttccttttctaatggagtatttggctgtaattgtgatcatgctccttttgatgcaatgattatggtgaacatcagttattatgtggatgagaaaatttttcagaatgaaggaagatggaagggttcagagaaggtacgagatataccacttccagaagagctcattttcattgtggatgagaaagttttaaatgacatcaaccaagctaaagcccagtatctcagggaggcatctgatctacagattgcggcttatgcctttacatcttttggcaaaaagctaaccaagaacaagatgcttcacccggatacgtttattcagcttgcacttcagctggcctattacagacttcatggacaccctggttgttgctatgaaacagctatgacaagacatttttatcatggccgtacagagactatgcgatcatgcacagttgaagcagtgaggtggtgccagtccatgcaggatccttctgtcaatcttcgtgagcggcagcaaaagatgttacaagcttttgcaaagcataataaaatgatgaaagattgttcagctggaaaaggatttgatcgtcaccttttaggtctcttactcatagcaaaagaggaaggtcttcctgttccagaactctttacggacccacttttttccaaaaggtttgttgtggcctgttcagcctggaaatcctgtcccgagactgatgcggaaaagctagttcagctgactttttgtgcttttcatgatatgatacagctgatgaactctactcatctttagagatgaatcatctattaagcacttaccaaaacatatcattaaactgagtgctgggagtgagttggtaatatgagatgggaaggaatgttgacttgctaacattcctttaacaagttaagaaaacttgttaaatgtagaaattagtagaatcatgctctctaaatttattctgccatagaaggtagaaatatttttaagctcctctgatgcagcagcaatgcaaattatgacatagtgaatatagaactatgcagtatttaagcctcaacaatccaaatctacaaactttaacaatgcaagtcttactctaatttttaagtatttttgttggtacttacatgggttataaatcctctctctggacatcaatgtagagtccatctttcaagcactttaatttttttagctgccaaagggtatgaattacattattgtatgctaatttccctgaaatcaatgccttctatgttcaccacagggatacaagcctgttatgtttgatgggaaagaccactacaatctaatggtgatctaaaataacttttttgggctgggtgcagtggctcatgcctataatcttagcactttgggaggccaaggtaggaggattgcttgaagctaggagtttgagaccagcctgggcaacagggtaaggtcctgtctctacaagatcaaaaacttagccgggtatggtggtgcatgtgtgcctgtagtccaagctacttgaaggctgagacaggaggatcggttgagcccaggaggttgtggctgcagtgagctgtgatgtgcccttatgctatagcctgggcaagagcgtgagaccctgtctcaaagaaaaaaaaaaaaaaaa

SEQ ID NO: 67 - DNA, 720 bp, Homo sapiens
  SITE (609): n equals a,t,g, or c
  SITE (688): n equals a,t,g, or c
  SITE (694): n equals a,t,g, or c
aattccgaagtttaaaatcggaggaaaagaagtttttagaagtaagataatacacaagaacctcaaccctgtgtgggaagaaaaagcttgtattctggttgatcatcttagggagccattgtatataaaggtatttgactatgattttggactacaggatgactttatgggctcagcctttctggatctgacacaattggagttaaacaggcccacagatgtgacccttactctgaaagatcctcattatcctgaccatgatcttggaatcattttgctctcagtcatccttacccctaaagaaggagagtccagggatgtgacaatgctaatgaggaasagttggaaaagatcaagtaaggaactttcagaaaatgaagyggttggatcttatttctctgtgaagtctctcttttggaggacgtgcggcaggccagctcttcctgtcctgggcttctgcagagcagagcttcagaatccttattgcaaaaatgtacaatttcagacccaaagtttacgcctatcagacctacacagaaaatcgcatctttggagaggaatagtcagcatcaccttgattgaagggagagacctcaaggccatggattncaacgggttgagcgatccctacgtgaagttccggttgggcatcagaagaccaggagcaggattatgccaaaacgtgaanctcagnggagggaacaattggatttcccttta

SEQ ID NO: 68 - DNA, 2906 bp, Homo sapiens
ccacgcgtccgggacaaccgcggcgcggctcggcgctcccggcctggcgttgtggcgccgcagcccttgccaccttccctgcacctgccctgcccggcctcatgtaccgcgcgctgtacgcgttccgctcggcggagcccaacgcgctggcgttcgccgcgggcgagaccttcctggtgctagagcgaagcagcgcgcactggtggctggccgcgcgggcgcgcagtggtgagacgggctacgtgccgccagcctacctgcgccgcctgcagggcctggagcaggatgtcctccaggccattgaccgggccatcgaggctgtacacaacacagccatgcgggatggtggcaagtacagcctggaacagcgtggagtcctccagaagctgatccaccaccggaaagagaccctgtcacgcagaggcccttcagcctccagtgttgcagttatgacctcatcaaccagtgaccaccacttggatgctgctgcagccaggcagcccaatggggtgtgtcgagctgggttcgagcggcagcacagcctacccagttctgagcatcttggggcagatggaggcctctaccagatcccacttccatcttcccagatcccaccacagcctcgccgagcagcacccaccacaccgcccccaccagtgaagcgccgagaccgcgaggccctgatggcctctgggagtggtggccacaacaccatgccctccgggggtaactctgtgtccagcggctcctcagtcagcagcacctccctggacacgctctataccagctccagcccatctgaaccaggctccagctgctcacccacacccccacctgtgccccgccgaggcacccacaccaccgtgtcccaagtccagccccctccctccaaggcatcagcacctgaaccccctgcagaagaagaagtggcaactggtacaacctcagcctctgatgacctggaagccctgggtacactgagcctggggaccacagaggagaaggcagcagctgaggcggctgtgcccaggaccattggggccgagctgatggagctggtgcggagaaacactggcctgagccacgaattatgccgggtggccatcggcatcatagtgggtcacatccaggcctcggtgccggccagctcaccagtcatggagcaggtcctcctctcactcgtagagggcaaggacctcagcatggccctgccctcagggcaggtctgccacgaccagcagaggctggaggtgatctttgcagacctggctcgccggaaggacgacgcccagcagcgcagttgggcactatatgaggatgagggtgtcatccgctgctacctagaggagctgctgcatattctgactgatgcagaccctgaagtttgcaagaaaatgtgcaagagaaacgagttcgagtctgtcctggccttggtggcctattaccaaatggaacaccgagcatcactgcggctgctgctcctcaagtgctttggcgccatgtgcagcctggatgcagccatcatctccacgcttgtgtcatccgtgctgcctgtagagctggcgagggacatgcagacagacacgcaggagcacctgggcacgcctttcgcccagttcctactgaacatcgtcgaggatgggctgcccttggacaccacagagcagctgccggacctctgcgtgaacctgcttctggctctcaacctgcacctgccagctgctgaccagaatgtcatcatggctgccctgagcaaacacgccaatgtcaagatcttctccgagaagctgttgttgctcctgaacagaggggatgaccctgtgcgcatcttcaaacatgagccacagccaccacactctgtcctcaagttcctgcaggacgtgtttggcagcccggccacagctgccatcttctaccacacagacatgatggctctcattgacatcactgtgcggcacatcgcagacctgtcaccaggagacaagctgcgcatggagtacctctccctgatgcatgctatagtccgcaccacaccctacctgcagcaccgccaccggctacccgacctgcaggccatactgcgacgcatcctgaatgaggaggagacctcaccccagtgccagatggaccgcatgattgtccgagagatgtgcaaggaattcctggtgctgggggaggctcccagctagcaccttgctgtcctcccttccctgcagctccagtcagtgtgcaggggactcaggggcttggccctaagaatgttttgcactgacagtgggaggggataaggtggcagaaggaacctgagcaggacccccacctgaagtagaacttaagagaggggccaagtgtaggattggggaccatggtctgggagctgttctggggcagggggaatatgcaagctaaagcccctctataccctggtaggcttcctcttcagcatgcccccctcttcaccccacacccatgtgtacactcagagtcctgctgccgctccaggctggaccagacccccatccccacccctcctggtctgtatcctgggcctcagcaagccatgcccctggggtgaggggaggcatctcccaccagctctattctttgccttagctttgcagtgagtgctgctcatgtcctcccctccacccgcacatgggggtcgctgcccttcactcctacccccagaggccttggccaagctgctgctttgaaagcgggatcttggagacaggccatccatcctggagcctcatggaacaggatgatggcactgagaaagccaatgaccgaatctcttttctctgtaaaaatgtagactgaaaaagccatgtgtattttcctatgtgctgtagctctcctttggaaataaatcacaggcatctggaaaaaaaaaaaaaaaaaaa

SEQ ID NO: 69 - DNA, 1646 bp, Homo sapiens
tagagtcagcgctgatgcctggcccaccttgagctgcctgtggatcctgaagtgaaagctctggttccagacagggctactgctgttcttgaccgtgcgtgtctggagcctgtggctgcaggccgtgggcagccagagagtcacgtagcagtcagagggggtcactgcgggaaggaacaagtgcccagcggtggacaagagcccttcccagccgcccagacccacttccttccatcacctagagccccatgtgggttaagactgagggggaggggaagtgggggccagaggcagagccccagctgccaccttccacccagaagctcctctcagctccctcctctaggccctgcccaccggcccacccgcctccaccaaatccagccacagcaccctcctcctcagcaccctcctcctccctcagcccagcacaggggccagggcggtgcgcactcacctaggtccttagagggtaggcgatgggcctgcaggacacgaaccgtgagcaggcaggtcctggacacctctgcctgcagaggtgggagaggggagacctgctacgggccgatgaagccaagggtgacaggggccacaaaggaggctggagcagtgcctcaaggcctaatcctgaaccccaggcccatcctccatctcatcagaatcctgaatcaacaagaggagacatcatatctccatcatgacgcctgccagcacttacacaatgctctgcgccggctctgggccaagggctttgcatacattaactcatttatcgcacaaccaccttatgcacagatactatttacgatggcccactccacaaggaaactgaggcacagagaagcagccacttgcctgaggtccacaattggggttggagcccgggcaggctggctccagatttatgcctcacacagacctgcttccaccttctcgggctagtatcctttaggctctccaccccacatccccagaccacaccccagctaagcagctttccggctgtgcttgggtggcaggggacataagctatcgagggaggggaagtagcacatcagggccttgggccccagactgagctgctctcgtaccctccctccaccctggtcagaagagcatcctggaaatgggctctctcctgggcaggggaggcggctcctagctcagacccctcacaggctgtcatgtcctccaggtcctgccaggtcaggctgaagatggtcccccggtagctccctccaaacccatgcccctggttctgggaatgcagcctggcaggcgcaccgggaccagggaagcctgtgccaactgcttcctttcggccttccacctgcctccacaaggaccctaacaggtcaagtccagggagcaaccaggtccagggcagtgctggagggcctcatccaccagggtcagcccagggccctcacactccaggcaactgagtcagaggagcatggaggagccacttgcttccagggcctcagggcggcagctgggagcctctgagtctccagggcccaaatctgtggtgccagggagctctgccaggagcccgttcccaggacagaaaacactcaggacggatccctcatccccaagcctcctcctcccctggcttctgcccgctaccctggctcgtgccg

SEQ ID NO: 70 - DNA, 588 bp, Homo sapiens
gcgcctgcaggtcgacactagtggatccaaagaattcggcacagtggttacggtcctgggaaagaaaactcctgcattcctcccctttaattgggtttattgttaaagcactggagcagctaatcctcacagacctgtaggagctggagtgggagctcaagcaggattcttcccgagtccctggcatcctcagaagcttcaactctggaggcaatgggtcgaaaggaagaagatgactgcagttcctggaagaaacagaccaccaacatccggaaaaccttcatttttatggaagtgctgggatcaggagctttctcagaagttttcctggtgaagcaaagactgactgggaagctctttgctctgaagtgcatcaagaagtcacctgccttccgggacagcagcctggagaatgagattgctgtgttgaaaaagatcaagcatgaaaacattgtgaccctggaggacatctatgagagcaccacccactactacctggycatgcagcttgkttctggtgkrgagctctttgaccggatcctggacggkgtgtctacacagagaaggatgccaggctgcggatccagc

SEQ ID NO: 71 - DNA, 434 bp, Homo sapiens
caggggtccamaragactacatccgccacctccatgacagccaacacgtggctkyyttccaccggggccgattcttccgcatggggacccactcccgaaacagcctgctttccccgagagccctggagcagcagtttcagagaatcctggatgatccctcaccggcctgcccccacgaggaacatctggcagctctgacagctgctcccaggggcacgtgggcccaggtgcggacatccctgaagacccaggcagcggaggccctggaggcggtggaaggggccgctttctttgtgtcactggatgctgagcccgcggggctcaccagggargacccggcagcgtcsttggatgcctacgcccatgctctgctggccggccggggccatgatcgctggtttgacaaatccttcaccctwatcgtcttctctaac

SEQ ID NO: 72 - DNA, 482 bp, Homo sapiens
  SITE (92): n equals a,t,g, or c
  SITE (100): n equals a,t,g, or c
gaaagaaatgaaccccctccccactcagctctccacaggtgccatcagtttcctgcgctctctcctggaaccggatcctgtgaagaggccanatattcancaggcactggcgaatcgctggcttaatgagaattacacgggcaaagtgccctgtaatgtcacctatcccaacaggatttctctggaagatctgagcccgagcgtcgtgctgcacatgaccgagaagctgggttacaagaacagcgacgtgatcaacactgtgctctccaaccgcgcctgccacatcctggccatctacttcctcttaaacaagaaactggagcgctatttgtcagggaaatctgacatccaggacagcctctgctacaagacccggctctaccagatagaaaagtacagggcccccaaggagtcctatgaggcctctctggacacctggacacgagatcttgaattccatgccgtgcagagataaaaagccc

SEQ ID NO: 73 - DNA, 913 bp, Homo sapiens
ggcacgaggcttggcggggtggataatatcctggtcaaaatgactgagccacatcagtgatgtcgttcctccaaagatgccgtgggtcagatatctgttcatgtggacatcactgccaccccaggaacgggagatcataaagtcactgtaaaagtgattgctattaatgacctaaactggcagaccacagcaatgttccgcccctttgtggaagtttgtatactgggacccaaccttggagacaagaagagaaaacaaggcacaaaaacaaaaagcaacacatggtcaccaaagtacaatgaaacatttcagttcattctcggaaaggaaaatcggccaggggcttatgaacttcatctctcagttaaggattactgctttgccagagaagatcgaattatcggaatgacagtcattcagctacagaacatagcagaaaagggaagctatggggcatggtatcctcttctgaaaaatatctctatggatgaaactggtttgactatccttagaatactctctcagaggaccagtgatgatgtggctaaagaatttgtaagacttaaatctgaaacaagatctactgaagagagtgcttgaaacaaacactgcaagctaaatacataactataattgtttgactactgcatgcatgtgcaaatacatgggaatgtttagttcactacatttcaatgtttgccagtactcatgtacgatgtctacaaggtatgtaaaaaacctgctgaacttttataccaattctggtctttgggaaatcagtgttccatgaagtgccaaaattatgatgtaaagtgaaatatcaagaacaccttttaacatgtttattttgtttctttacccatttcacattcattaaacataatttttaaaaactaaaaaaaaaaaaaaaaaa

SEQ ID NO: 74 - DNA, 1467 bp, Homo sapiens
gaacttctctcccagggcggtgcgacccggagctccagcgcccgagtctccacttcgtttgctgaaacttgctttctaccagctaagaaccatgctgcgagtgattgtggaatctgccagcaatatccctaaaacgaaatttggcaagccggatcctattgtttctgtcatttttaaggatgagaaaaagaaaacaaagaaagttgataatgaattgaaccctgtctggaatgagattttggagtttgacttgaggggtataccactggacttttcatcttcccttgggattattgtgaaagattttgagacaattggacaaaataaattaattggcacggcgactgtagccctgaaggacctgactggtgaccagagcagatccctgccgtacaagctgatctccctgctaaatgaaaaagggcaagatactggggccaccattgacttggtgatcggctatgatccgccttctgctccacatccaaatgacctgagcgggcccagcgtgccaggcatgggaggagatggggaagaagatgaaggtgatgaagacaggttggacaatgcagtcaggggccctgggcccaaggggccagttgggacggtgtcggaagctcagcttgctcggaggctcaccaaagtaaagaacagccggcggatgctgtcaaataagccacaggacttccagatccgcgtccgagtgattgagggccgacagttaagtggtaacaacataaggcctgtggtcaaagttcacgtctgtggccagacacaccgaacaagaatcaagagaggaaacaaccctttttttgatgagttgtttttctacaatgtcaacatgaccccttctgaattgatggatgagatcatcagcatccgggtttataattctcactctctgcgggcagattgtctgatgggggaatttaagattgatgttggatttgtttatgatgaacctggccatgctgtcatgagaaagtggcttcttctcaatgacccggaagataccagttcaggttctaaaggttatatgaaagtcagcatgtttgtcctgggaaccggagatgagcctcctcctgagagacgagatcgtgataatgacagtgatgatgtggagagtaatttgttactccctgctggcattgccctccggtgggtgaccttcttgctgaaaatctaccgagctgaggacatcccccagatggatgatgccttctcacagacagtaaaggaaatatttggaggcaatgcagataagaaaaatctcgtggatccttttgtagaagtttcctttgctggaaaaaaggtttgtacaaacataattgagaaaaatgcaaacccagagtggaatcaggtcgtcaatcttcagatcaagtttccttcagtgtgtgaaaaagataaaactaaccaagtatatgactgggaccgtcttactaaaaatgatgtagttggaacgtcgac

SEQ ID NO: 75 - DNA, 2242 bp, Homo sapiens
ccacgcgtccgcaaagccccccgaaaagggcaaaggttggagcaaaacgtcccactcactggaggcacctgaggacgacgggggctggtcaagtgcagaggagcagattaactcgtccgacgcagaggaggacggcgggttgggccccaagaagctggttccaggtaaatacacggtcgtggcggaccacgagaagggaggccccgatgcgctgcgcgtgaggagcggggacgtggtggagctggtgcaggagggcgacgagggcctctggtaagaccccgcgctcagccccggactgccccgcacgtggctgccgctgaccctcgccccttgcaggtacgtcagggacccgaccactggcaaggagggctgggtgccggccagcagcctgtccgtccggctcggcccgtccggctcggcccagtgcctgagcagctcagagtcgagcccggggtcggccgtgctgagcaactcgtccagctgcagcgagggcggccaggcccccttctccgacctgcaggggtagcgcggcctcggcgccggagacccgcgcgctgtctggggctgcggtggcgtggggagggcgcggcccccggacgccccgaggaaggggcacctcaccgccccgacccagagcgcctggccgtgcgggctgcagaggacccctccggggcagaggcaggttccacggaaaaccccggcccgctggggcttccccggagactccagagcccacagaggaggggccgcagggaacagccccgggcggcaggcgccgggcagcggcatctcgtcctggctccaccgtgctgcttctgcctccggacggtgctttcaggggacgcgcggaccgtggtggagctgcttccggagaagtggaggatcctctggccaacggcctgaggagagcggggcacggggtctctttagcttttacaagttttaggattttttcaagcagggatcaatcccgtggccattttttgtggtactttggcctcaattcttcaccaggaatcactgtgtttacatgaaatgacaatttgatactgtatttgatagaaaactatttttttgttaccggggtttacatagaagcacgttgtttataccactaagtgactttggcggggctctcccatggaaacggatggcactccctgaagctccctggtcacaggtggatgaaaacgtgtccgtgggtgacatcaggtggtgtctccaccaccaaaagcagttagaagccaaggagattcctttatctacctagggttcattttcaaaagaaaatttaaactataatttaaacaattaacgttcttttctacaaaaaaaatgcagggacttgatttttttaaagagcttcactgaattaggatatttttattgcttttaaagaaaatacaaagatgcagtttctgcagggtgtggcgtggaccagtgctgccgaccatagctcagagagccctgcccctgcctcactgcactgcagcctcctcggaggccgcacctccactccactccccacgcgccccctgcctcccacccaggtccacctgccacctggtgaccaccttgagtacagaagtgaaagtggggagagtattttattcaagtcacagcagaactggaaaaaaactcttctgttttaccaacttcttgtgtttcagaaacatattctgttcaaaacttttgaagccctttcggtgtctagtctgcagatgtttttgtatgtgtgcacctctgaccatgtgtgtacatatgtgtcttgctggaaaggacatattcgctgtcccccgtgctgctgggagggccgcctcacagcctcacggttcccagccccagcacagtggaggcaggcgtggctgcattcccctcacgctaccctcccagcggcttgtagccgtcactggccagacctccagggtgcggaatcaaataggaagcatgcagagactcggcagcttttcctctgatgtgtaagttatttggaacgcgtgctgtgtcccgcgatgtccctgatgtactgtgcaggcgcggtgcctccgtctcgtcgcacagctgcgcgcccttgtgtgaccctccccataaaggcactttacagcttcatgtttcatccactgtcacttttttttaactgctgatgtaaatggaattttaaaagcagagttctttattgtatggatgacgtttgaataaatatcagcaactcctaaaaaaaaaaaaaaaaaaaaaaaaaaaa

SEQ ID NO: 76 - DNA, 1640 bp, Homo sapiens
  SITE (1620): n equals a,t,g, or c
cgggtcgacccacgcgtccggtgacgggatcctcttcatgcacaagatgagggttttgcacctggacctcaagccagagaacatcctgtgtgtcaacaccaccgggcatttggtgaagatcattgactttggcctggcacggaggtataaccccaacgagaagctgaaggtgaactttgggaccccagagttcctgtcacctgaggtggtgaattatgaccaaatctccgataagacagacatgtggagtatgggggtgatcacctacatgctatgagaagagtgaggctcagagaggggagatgacttacccaaagtcacccagccagattcaaacccaggctgagcggcctctcccccttcctgggagatgatgacacagagaccctaaacaacgttctatctggcaactggtactttgatgaagagacctttgaggccgtatcagacgaggccaaagactttgtctccaacctcatcgtcaaggaccagagggcccggatgaacgctgcccagtgtctcgcccatccctggctcaacaacctggcggagaaagccaaacgctgtaaccgacgccttaagtcccagatcttgcttaagaaatacctcatgaagaggcgctggaagaaaaacttcattgctgtcagcgctgccaaccgcttcaagaagatcagcagctcgggggcactgatggctctgggggtctgagccctgggcgcagctgaagcctggacgcagccacacagtggccggggctgaagccacacagcccagaaggccagaaaaggcagccagatccccagggcagcctcgttaggacaaggctgtgccaggctgggargctcggggctccccacgcccccatgcagtgaccgcttccccgatgtgagccgcctcggagtgtggcctggatccatcctgctagcacctccccagacagggctccagcctgtcggccacaccccagactccaggcccccgttgaagccgctcccggttccctccccagctcctcgtctttgaactgccgccgccgtggtgacccctgctttgccccactgggagagkssktagcctgggcctcctcctagctggagtgccatggctggggggtctcagcatgtasggcttctgtggttgtggatgggaggctcctggtggggcagaaaggctgcaacgctgattcctaaggcccagctgccagggaagacagagcaggctttgtgagagaggacctccatgcccccgccacctccccactccagcagataaggccgagcccacaccatctggcccaggctggcccccacccaccttccttgcgaccaccaacacacaggaactctgtgtgagagagagggcgcccagcccaggcctggtggagggggaggggagaagccaagggacacaggagaccacccccgagcttgcctcagggccaagccggcccaacccaaccactcggggcccccatcttgggggtcacccatggcctcagatgatggggtcagcaggcccaggagaattaggaaggccatggggcagcctccagtctgctctcagcttgtgccttgtaaataaatgtacaggttggatgtggcctccttccctctgtgtgancctgcactggtgtgaggtcg

SEQ ID NO: 77 - DNA, 2026 bp, Homo sapiens
aggaaccggcggactcggttggcgttgtggggcagggggtggtggagcaagatggcggctcatctgtcctacggccgagtgaacctaaacgtgttgcgcgaggcggtgcgtcgcgagctgcgcgagttcctggacaagtgcgcaggaagcaaggcaatagtttgggatgaatacctaactggaccctttggcctgattgcacagtattcactattgaaggaacatgaagtggaaaaaatgttcacacttaaaggaaatcgtttgccggcagctgatgtgaagaatataattttttttgtcagacccaggctagagttgatggatataatcgctgaaaacgtgctcagtgaagatagacgaggcccaacgagagattttcatattctgtttgtgccacgccgtagcctgttgtgcgaacagcggttgaaggatctgggtgtcttgggatcctttattcacagggaggagtacagcttagatctcattccattcgatggggatctcttatccatggaatcagagggtgcattcaaagagtgctacctggagggtgaccagacgagcctgtaccacgcagccaaggggctgatgaccctgcaagctctgtatggaacgatcccccagatctttgggaaaggagaatgcgctcggcaagtggccaatatgatgatcaggatgaagagagagtttacaggaagccagaattcaatatttcctgtttttgataatctcttgttgcttgatcggaatgtggatttattaacacctcttgccactcagctgacatatgaaggactcattgatgaaatttatggcattcagaacagttatgtgaaattacctccagagaaatttgcacctaagaaacagggcgatggtggtaaggacctccccacggaagcaaagaagctgcagctgaattctgcagaggagctctatgctgagatccgagataagaacttcaacgcagttggctctgtgctcagcaagaaagcaaagatcatctctgcagcattcgaggaaagacacaatgctaagaccgtgggggagatcaagcagtttgtttcccagttgccccacatgcaggcagcaaggggctcgcttgcaaaccatacctcaattgcagaattgatcaagatgtcactacttctgaagactttyttsataaattaaccgtggaacaggagtttatgtctggaatagacactgataaggtcaacaattacattgaggattgtatcgcccaaaagcactcgttgatcaaggtgttaagactagtttgcctccaatccgtgtgtaatagtgggctcaaacaaaaagttttggattattacaaaagagagattctccagacatacggctatgagcacatattgaccttacacaacctggagaaggccggcctgctgaaaccgcagacggggggcagmaacaattacccaactatacggaaaacattacgcctctggatggatgatgttaatgagcaaaaccccacggacatatcgtatgtgtacagtgggtatgccccgctcagtgtgcggctggcccagctgctttcccggcctggctggcggagcatcgaggaggtcctccgcatcctcccagggccccactttgaggagcggcagcactgcccacaggactgcagaagaaacgtcaaccgggagaaaaccgagtgactctgatatttttccttgggggcgtaaccttcgctgaaattgctgccctgcgatttctctcccagttggaagatggaggtacagaatatgtcattgccaccactaaactaatgaatggaaccagttggatagaggctctgatggaaaaacctttctaggatgttcagaggagacttaacaagtgtactgcagaataaactacctctttgaagaaattgctgaaaggaagtaaaaccccatagaagaaacatgggaatacagaatatattctggggtcagcttcttaaattatactactgtttactgcwtaaaaaaaaaaaaaaaaaaaaaaaaaaaaaaaaaaa

SEQ ID NO: 78 - DNA, 1287 bp, Homo sapiens
  SITE (1240): n equals a,t,g, or c
  SITE (1280): n equals a,t,g, or c
cacccggggggcgcaccccgatataatggagagttttttatttcacagttgccgcggggcctctcttacatccccccgggtttattttttgcacmgagmcctaaaccacagaaccttctgatcagtgacacggkggagttaaagctggcagattcggtcttgcaagagcaaaatccgtccctagccacacatactccaacgaatgttaccttgtgktacagacctccagatgtccttctaggctcaacagaatattccacctgccttgacatgtggggagtaggttgcatctttgttgaaatgatccaaggagttgctgcttttccaggaatgaaagacattcaggatcaacttgaacgaatatttctggttcttggaacaccaaatgaggacacatggcctggagttcattctttaccacattttaagccagaacgctttaccctgtacagctctaaaaaccttagacaagcatggaataagctcagctatgtgaaccatgcagaggacctggcctccaagctcctacaatgttccccaaagaacagactgtcggcacaggctgccttgagccacgagtattttagtgacctgccgccacggctatgggaactcaccgacatgtcttctatttttactgtcccaaatgtgagattgcaaccagaagctggagaaagcatgcgggcctttgggaaaaacaatagttatggcaaaagtctatcaaacagcaagcactgacaagcagcacattctcaagagcacacaggattaagttgtcatcattctgggaagaaaaaaaaaacattaatgaagaggccaataatatgaagggaatcatggatcagttttctttcgctccctgtggtggatttcacttacaagaaaattgaagctggcaagaccctgttttctctgcaatttatttaaaaccttgcacgcatttggataccttgtgatttccaagaactacgtgaagattaagctttgcttactgatacatggcatgtattcttttcagtcttttgtgtttgattttgtttgatttccctctgcagcacagcgtctctgtaaaaggtttttatgctttcaccagccatgtcttaaatacattaaggacaacacatttggtgttcacacttcttccagtaaatgtctggaacttggaaagccacagagtggcattaaaacaatgtgtgttttctttgaggagcagtgcacattttgcaaccactagggaggnatttttctgctaaagcaaacccctgttctctggacttganaacttgg

SEQ ID NO: 79 - DNA, 1207 bp, Homo sapiens
catcgttgatgaaatccccctctggcgcagcatttggttccgtgctggggctgatggcatttttctacttcttcgcccgtttgacgctgttttgcgcggcgtggattgccaccgccgaatataaagacgacccgcgaatgccggggaaaacgcagccttaaaataggccggatgcggcgtaaacgccttatccggcatacgattttattcggcctggctccccgtaggccggataagatgcgccagcatcgcatccggctataatgcgcacataacctcttgaaactcgtccccagagcctcttcagccatctatttgggagcaaacaatttcattccaactcataaccccagcatataaatccagttggtaacttttatttaacctgaaaccagttttatccactatttataaaattatgtgaagcatttcatagaagaaaaatcactggcctaaacattatcccctttttgcctgatttttgaccatttccgcgatttgttacacattgaaatatcacttttgctgtgcgtaatatggctattcgttagccaaaaaataagaaaagattatgcaagcaacagccacaacactcgaccacgagcaagaatacacgccgatcaactcgcgtaataaagtccttgtcgcctctctcattggcacagccattgagttcttcgacttttacatttacgccactgcggccgttattgtgtttccgcatatcttcttcccgcagggcgatcctacggcagcaacgctacagtcgctcgccaccttcgccatcgccttcgtcgcgcgccccattggctctgccgtttttggtcattttggcgatcgcgttgggcgtaaagcgacgctggtcgcctcgttgctaacgatggggatttcgaccgtggtgattggtctgctgccgggctatgccacgattggtattttcgccccgctgctgtggcgctggctcgatttggtcagggtctgggcttaggcggtgaatggggcggcgcggcgctgctggcgactgaaaacgccccaccgsgcaaacgtgcactgtatggctcctttccgcagctgggcgcaccgcatatgccggtgatgcgtgatctgataaagcaacatcgttctcccatggagctgataacaattctgcggtgacttgcgcttaacgggctgcccctgatgcaaatccgcttccccgcggcagcca

SEQ ID NO: 80 - DNA, 412 bp, Homo sapiens
cgtgggctcctgaagcttctagccggagcatccaccaagaagaagtcacgctccccgccatctgtgtctccaacccacgacccccaggtggccgtggacgccctgctccaaggtgcagtgggccccgaagtgtcctcactgtccatccacggcagggcagggtcctgccccatagagagcgagatgcagggtgccatggggatggagcctctgcacaggaaggcaggctccttggatctaaacttcacatctccttcccggcaagctccgctgtccatggctgccatccgccccgagcccaagctgttgcccagagagaggtaccgcgtggtggtctcgtamccamcccagagtgaggcggagatcgagctgaaggaaggcgacatcgtctttgtgcacaagaagcgtgatg

SEQ ID NO: 81 - DNA, 1065 bp, Homo sapiens
cagctgaagtcttcttgcacttgacaaacttgttgtggttcatcagagacactttgacaaacacacctagggaacgagggattggatcaagctggggcgagatagagtggggaagtgatgagctaagaaaaattagcctgcaagcatgacgtgtcgcacgtcagcaaggctgcagccttggattctgatgtcttgagaagagcgattcacctgtgaattctcacagccctggcctcagaaagacggcccgggaccaggcccgatggcacccctcttcccagctctcagccagggcggaaggcacaagtgatggccctggcctccgcagtcacactcctcctgaaagctgactggctgaacctcacctcttggctagcttgccacccagctcttgagaacatgtttgtccaaggcctcttggcaggtctcgatgactccttcccctaagggcccccagtcacctgctaaggctcccaggcccctgtgaaactggctcggtgccccaatagactctccacctccagaccctaagccggccagcccagagtgcagcaaggcaccacacctaccctgtgagggcactcgggccccgcgctggcctctgacagcacaggaagcttctgcattcacgctgaggcctgtcttttgccttccttggataaacttgccagaaaccccatagtgcttcaggcctttgggataattcccctgagccccataggccagggcctggcattcagtagttgctctaaaattgtgttttcacccactctcttccaggtagtcaggacagggaagcccaggcttctggtcaccactcaccaaatctctcccctgcccctctatcagggatcagctcctataggccttaacctagcagactaggtaaagcagagctggtggcatcaagggtcccgggggctgcagagccctggctggtacaggaggctgggctctcctgtaggtctgcaccttcccagcaacgcggagggcaccagaccctgcctgctccagaggctgtacctgaaagatgaagtgctcgtcaaaaaaaaaaaaaaaaaaaaa

SEQ ID NO: 82 - DNA, 2886 bp, Homo sapiens
gcgtggctggcaagagtggcctggagaaagagctcagcgcttgaccagccgagctgcccgtractacaagatccagaaccatgggcatcgggtactgcaacgactggagcagaggcggcagcaggcttcagagcgggaggctccaagcatagaacagaggttacaggaagtgcgagagagcatccgccgggcacaggtgagccaggtgaagggggctgcccggctggccctgctgcagggggctggcttagatgtggagcgctggctgaagccagccatgacccaggcccaggatgargtggagcaggagcggcggctcagtgaggctcggctgtcccagagggacctctctccaaccgctgaggatgctgagctttctgactttgaggaatgtgaggagacgggagagctctttgaggagcctgccccccaagccctggccacgagggccctcccctgccctgcacacgtggtatttcgctatcagggcgtgaggatgagctgacaatcacggagggctcggaaccagcacggcgaggtaggctttgtccctgagcgatatctcaacttcccggacctctccctcccagagagcagccaagacagtgacaatccctgcggggcagagcccacagcattcctggcacaggccctgtacagctacaccggacagagtgcagaggagctgagcttccctgagggggcactcatccgtctgctgccccgggcccaagatggagtagatgacggcttctggaggggagaatttgggggccgtgttggggtcttcccctccctgctggtggaagagctgcttggccccccagggccacctgaactctctgaccctgaacagatgctgccgtccccttctcctcccagcttctccccacctgcacctacctctgtgttggatgggccccctgcacctgtcctgcctggggattcaggaggtacatgtgcttgtttgtcatatggatatattgcatactggtggagattgggcttctagtgtacctgtaactcaaatagtgaacattgtacctgatagacaaagccctggacttccctgggttcctggacatgatggcacctcgactcaggccgatgcgtccaccacctcccccgccggctaaagccccggmtcctggccacccagatcccctcacctgaaggccagggaagccttgacccccagtgatgctgctgtccctatcttcaagctgtcagaccacaccatcaatgatccagagcaacacagccaaaagctggaatcgcccttatttccaccctcacctccaagggtggaaacttgccccttcccatttctagagctggaacccactcctttttttcccattgttctatcatctctaggaccggaactaccttctcttctgtcatgaccctatctagggtggtgaaatgcctgaaatctctggggctggaaaccatccatcaaggtctctagtagttctggcccacctctttccccaccctggctccatgacccaccccactctggatgccagggtcactggggttgggctggggagaggaacaggccttgggaatcaggagctggagccaggatgcgaagcagctgtaatggtctgagcggatttattgacaatgaataaagggcacgaaggccaggccagggcctgggcctcttgtgctaagagggcagggggcctacggtgctattgctttaggggcccaccacgggcaggggcctgctcccagctgccacgctctatcatatggagcgaggtgttggggaaggcggggcaggcagcctgttgcaggcaggggaaggagaagagactgaggggctgtgacctctcctgaggcccccagcctgagactgtgcaactccaggtggaagtagagctggtccctcagctggggggcagtgctgtccagtggaggggagggctttcacgcccacccaccccctggccctgccagctggtagtccatcagcacaatgaaggagactcacatactccctgctccctgtggtagagacacctggtgatcagaagtgtctggtttgcttggctgcccatttgcctcttgagtgggcagccctgggcttgggcccctccctccggccctcagtgttggctctgcagaagctctggggttcccttcaagtgcacgaggggttaggctgctgtccctgagtcctccattctgtactggggggctggctaggacctggggctgtggcctctcagggggcagcctctccatggcaggcatccctgccttgggctgccctcccccagacccctgaccaccccctgggtcctgtcccccaccagagccccagctcctgtctgtgggggagccatcacggtgttcgtgcagtccatagcgcttctcaatgtgtgtcacccggaacctgcccacagagaacacagtggtctcccctgtccgggggcggctttttccttccttggagcgtccctgacggacaagtggaggcctcttgctgcggctgcaatggaggcaaggggctgcagagcccaggtgcactgtgtgatgatgggagggggctccgtcctgcaggctggaggtggcatccacactggacagctgcactgtcccttctccttcactgtcccccagcatctccttcaaggcctcagcattggcttcattctggatgatgcagcgaacaatcctctctactgtgtcctcattcatgtcatcgtcctcagggggctgaagctgggcatcgtcaggctcagagcccctcgacgtgcggcagcggtagcccttcttcttgagcacgtggcagatcatgaagcctaccaggcccatgaggaagaagaccagcacaagcaggaagagcatatatagccccccacgcgtccg

SEQ ID NO: 83 - DNA, 1087 bp, Homo sapiens
acccacgcgtccggaagaactctgggaactacgggggcaccactatctgcaccaggaatccctaaagccagccccagtactggtagagaagcctctgccagagtggccagtgcctcagttcatcaacctctttctaccagagtttcccattaggcccattagggggcagcagcagctgaagattttaggcctcgtggctaaaggctcctttggaactgtcctcaaggtgctagattgcacccagaaagctgtatttgcagtgaaggtggtgcccaaggtaaaggtcctacagagggataccgtgaggcagtgcaaagaggaggttagcatccarcgacagatcaaccatccctttgtacacagcttgggggacagctggcagggaaaacggcaccttttcattatgtgtagctactgcagcacagatctgtactccctttggtcggctgttggctgctttcctgaggcttccatccgtctctttgctgccgagttggtgctggtactgtgttatctccatgacttgggcatcatgcatcgagatgtgaagatggagaatattcttctagatgaacgaggccatctgaaactgacagactttggtctgtcccgccacgtgccccagggagctcaagcctacactatctgtggcactcttcagtacatgggtgagagaggttaaagctgatggctggactgtgctgctgccatctcggctcactgcaacctccctgcctgattctcctgactcagcctgtcgagtgcctgcgattgcaggcgcgcggcgccatgcctgactggttttcgtatttttttggtggagacggggtttcgctgtgttggccggactggtctccagctcctaactgcgagtgatccgccagcctcggcctcccgaggtgccgggattgcagacggagtctcgttaactcagtgctcagtggtgcccaggctggagtgcagtggcgtgatctcggctcgctacaacctccacctcccagccgcctgccttggccccccaaagtgccgagattgcagcctctgcccggacgccaccccgtctgggaagtgaggagcgtctctgcct

SEQ ID NO: 84 - DNA, 415 bp, Homo sapiens
  SITE (352): n equals a,t,g, or c
  SITE (385): n equals a,t,g, or c
gaattcggcagaggctgagctggcccccagtaacaggctctcctctgattactcacagcactgctagaggggttcaacatccgggagagcaccagctacattgaggaacacatagaccggcagtgtsgcctatagaaagcctgcgcctcatgtgccttttgtccatcactgagaatggtttgatccccaaggattaccgatctctgaaaacacagtatctgcagagctatggccctgagcacctgctaaccttctccaatctgcgargagctgggcttctaacggrgcaggcccccggggacaacytcacagcgtggagagtaaagtgagcaagctkgtgaccgacaaaggnttcaggaaaggttacttgatgcctttaagtttnttggccaagaggagcaatttttgtgcccat

SEQ ID NO: 85 - DNA, 1777 bp, Homo sapiens
cgcctcctgcccgatccgcgctgaccctgcgcgggacgcagccccaggcggctgcctagccgaggcgggagcccgagctgagtcgagctcgccggagcggctgtgctggatgccctggaggaacaaggaggcctccagtccctcttctgctaatccccccttggaagccctccagagccccagcttcagaggcaacatggcggacaagctgaaggaccccagcaccctgggcttcctggaggcggccgtgaagatcagccacacgtccccagatatcccagctgaggtgcagatgtcggtcaaggagcacatcatgcgtcacacccggctgcagcggcaaactacagagccagcgtcatccaccaggcacacgtccttcaagcgccacctgccaaggcagatgcatgtctccagtgtagactatggcaatgagcttccaccagcagcagagcagcccaccagcattggccgcatcaagcctgagctctacaagcagaagtcagtggatggggaggatgccaagtctgaggccaccaagagctgcgggaagatcaacttcagcctacgctacgattacgagaccgagaccctgattgtgcgtatcctgaaggcttttgacctccctgccaaggacttttgtggaagctctgacccttatgtcaagatctacctcctgcctgaccgcaaatgcaagctgcagacccgggtgcaccgcaagaccctgaaccccacctttgatgagaacttccacttccctgtgccctatgaggagctggctgaccgcaagctgcatctcagtgtcttcgactttgaccgcttctcccgccatgacatgattggcgaggtcatcctggacaacctctttgaggcctctgacctgtctcgggaaacctccatctggaaggatatccaatatgccacaagtgaaagcgtggacttgggagagatcatgttctccctttgctacctgcccactgcaggcaggctcaccctcacagtgattaagtgtcggaacctcaaggcgatggacatcacaggctattcagatccctatgtgaaagtgtccttgctctgtgatgggcggaggctgaagaagaagaaaacaaccataaagaaaacactctcaatcctgtctacaatgaggccatcatctttgacattcccccggaaaacatggatcaagtcagcctgctcatctcagtcatggactatgatcgagtgggccacaatgagatcataggagtctgtcgtgtggggatcactgctgaaggcctgggcagggaccactggaacgagatgctggcatacccccggaagcccatcgcacactggcactccttggtggaggtaaagaaatccttcaaagagggaaaccctcggttgtgatttcattcacgtggatgctgcaagcagagagactgccacctggagttaggatggcagggccgagctgctagcttcgacagtgagagctcgtgcccatctccgaaaccacctccaacaccatgagatgtgcagccaaataacacaaatgggactcagcaatgttctctttgcacttgttcaaccgtctaaacagtgttgtgcagtcgcagtggcggcagcagcggcagccgtccgtcactccagagtcttacctgctcctgtgtaggtcaaggctgagacacttgtcatgtggtcagatctgtcttagtcttttgtgtctcccaaggtgatgtttttgtggtttttcacttttatgggtcgcggtaaaaaagggaaaaaaaaaaaaaaaaaa

SEQ ID NO: 86 - DNA, 1194 bp, Homo sapiens
ggcacgagccggtccccacctccatgccttgccctgtcctgctgggccctgccctggacctgggctggagaaggatggaactcttgcaccggagcagcgagagaaccctgagctacgccaaggcgcggcaggagccggaagagcagagcctccaaaagctttatcaaaaccgggagaagtccgaggagcaactgaccctgaagcaagaggaagccttccgcagctactttgagatcttcaatggtcctggtgaggtggatgcacagagcctgaagaatatcctgctcctaatgggcttctctgtgacgctggcccaggtggaggacgccctgatgagtgctgatgtcaatggagatggtcgtgtggacttcaaagacttcttggctgtgatgacagacaccaggcgcttcttctgctctgtggaacagaacgccctgtcggacatggctccccacaacccccacactctactctttgagatcctgtccctgctggtagagatgctggccttaccagaggcagtcttagaggaaatcacaaactactaccagaaaaagctgaaggaaggcacctgcaaggcccaggagatggaagcggccgtaggccggctgcggttgcagaagcttccctacaacccccagcaagaagagagctcagaagttccagaacgaaaggtcctcagtatcctgagccggctgaagcagcagaactatgctcccaacctgcagagcccctatgcccaggtgccctgcatcctgctctgcccacagctggacaagaagatggtccgtaggcagccgagcaaccactatgcactagaccagtgcacaccccctggcctggatcctgacatccgcagccccttcttccagtcaggatctcaaggaaacagggaacacaactctgacagcagaaagtggctcagctctgtgccagctcgaacccactgaccctctggaggcctgactctaggcagctgctcaaggcctgtagacagatgggccaccaggcaggagctgctgctgggatttgcttttgtggcctggtgagctaataaacaccaataacttcaaaaaaaaaaaaaaaaaaaaaaaaaaaaaaaaaaaaaaaaaaaaaaaaaaaaaaaaaaaaaaaaaaaaaaaaaaaaaaaaaaaaaaaaaaaaaaaaaaaaaaaaaaaaaaaaaaaaaaaaaaa

SEQ ID NO: 87 - DNA, 1083 bp, Homo sapiens
  SITE (999): n equals a,t,g, or c
  SITE (1051): n equals a,t,g, or c
  SITE (1075): n equals a,t,g, or c
  SITE (1077): n equals a,t,g, or c
gtttaacttggcagcatatcatcagctatttgttgggacagaaagaattcgagctccagagattattttccagccatctctcataggagaagaacaggctgggattgcagagactcttcagtacattctggacaggtacccaaaggacattcaggaaatgctggttcagaacgttttcctcactggcggcaacacgatgtatcctggcatgaaagccagaatggagaaggaactgttggagatgagacccttccggtcttcttttcaggttcaacttgcctcgaaccctgtgctggatgcctggtacggtgctcgtgactgggccttgaaccacctagatgataatgaagtttggatcaccaggaaagagtatgaagaaaagggaggagagtacctcaaggagcactgtgcttccaacatctatgtccccatccgcctgccgaagcaggcctcccgctcctcagatgcccaggcatccagcaagggctccgctgctggtggaggtggtgctggtgagcaggcatagcagaggccctccagagagactgccctgcacgccatgccttgggccacgttggcagtgtgacaggactgtgattgtgctagatgtacctgcccaagtctgctggtcacatttggcagcaaaatggatttctcctggggagaacaaagttaagggacactgagacctgcccttcagaattcggttcacttgggggcttctgtggtagagactaactggccttctgatgtctttgttcaactgtggccagctgtggcatcagcttcctggagcagtaaatgaagacagagtggaggacacaaatgtacaaaatgcacaagactgatttcttaccacattttagtctttcttgttttaaaaaaaattctttaaaatttatcttgtcccgtgtagatactttattcttctggatgtattcagaaattgcatgaatgcccagtgaggggaggtctttcatgcatataaaaaggtaatgnttattgccgggcacagtggcacgtgcctggtaaggctcaatctccgaagtancttgggactacaggtctgtgccancnaaccca

SEQ ID NO: 88 - DNA, 3319 bp, Homo sapiens
ggcacgagggacagagaggcgggcggggatggtgtgcggggctgcggctcctgcgtccctcccagcggcgcgtgagcggcactgatttgtccctggggcggcagcgcggacccgcccggagatgaggcgtcgattagcaaggtaaaagtaacagaaccatggctcagtttccaacaccttttggtggcagcctggatatctgggccataactgtagaggaaagagcgaagcatgatcagcagttccatagtttaaagccaatatctggattcattactggtgatcaagctagaaactttttttttcaatctgggttacctcaacctgttttagcacagatatgggcactagctgacatgaataatgatggaagaatggatcaagtggagttttccatagctatgaaacttatcaaactgaagctacaaggatatcagctaccctctgcacttccccctgtcatgaaacagcaaccagttgctatttctagcgcaccagcatttggtatgggaggtatcgccagcatgccaccgcttacagctgttgctccagtgccaatgggatccattccagttgttggaatgtctccaaccctagtatcttctgttcccacagcagctgtgccccccctggctaacggggctccccctgttatacaacctctgcctgcatttgctcatcctgcagccacattgccaaagagttcttcctttagtagatctggtccagggtcacaactaaacactaaattacaaaaggcacagtcatttgatgtggccagtgtcccaccagtggcagagtgggctgttcctcagtcatcaagactgaaatacaggcaattattcaatagtcatgacaaaactatgagtggacacttaacaggttcctgtttaggtccccaagcaagaactattcttatgcagtcaagtttaccacaggctcagctggcttcaatatggaatctttctgacattgatcaagatggaaaacttacagcagaggaatttatcctggcaatgcacctcattgatgtagctatgtctggccaaccactgccacctgtcctgcctccagaatacattccaccttcttttagaagagttcgatctggcagtggtatatctgtcataagctcaacatctgtagatcagaggctaccagaggaaccagttttagaagatgaacaacaacaattagaaaagaaattacctgtaacgtttgaagataagaagcgggagaactttgaacgtggcaacctggaactggagaaacgaaggcaagctctcctggaacagcagcgcaaggagcaggagcgcctggcccagctggagcgggcggagcaggagaggaaggagcgtgagcgccaggagcaagagcgcaaaagacaactggaactggagaagcaactggaaaagcagcgggagctagaacggcagagagaggaggagaggaggaaagaaattgagaggcgagaggctgcaaaacgggaacttgaaaggcaacgacaacttgagtgggaacggaatcgaaggcaagaactactaaatcaaagaaacaaagaacaagaggacatagttgtactgaaagcaaagaaaaagactttggaatttgaattagaagctctaaatgataaaaagcatcaactagaagggaaacttcaagatatcagatgtcgattgaccacccaaaggcaagaaattgagagcacaaacaaatctagagagttgagaattgccgaaatcacccatctacagcaacaattacaggaatctcagcaaatgcttggaagacttattccagaaaaacagatactcaatgaccaattaaaacaagttcagcagaacagtttgcacagagattcacttgttacacttaaaagagccttagaagcaaaagaactagctcggcagcacctacgagaccaactggatgaagtggagaaagaaactagatcaaaactacaggagattgatattttcaataatcagctgaaggaactaagagaaatacacaataagcaacaactccagaagcaaaagtccatggaggctgaacgactgaaacagaaagaacaagaacgaaagatcatagaattagaaaaacaaaaagaagaagcccaaagacgagctcaggaaagggacaagcagtggctggagcatgtgcagcaggaggacgagcatcagagaccaagaaaactccacgaagaggaaaaactgaaaagggaggagagtgtcaaaaagaaggatggcgaggaaaaaggcaaacaggaagcacaagacaagctgggtcggcttttccatcaacaccaagaaccagctaagccagctgtccaggcaccctggtccactgcagaaaaaggtccacttaccatttctgcacaggaaaatgtaaaagtggtgtattaccgggcactgtacccctttgaatccagaagccatgatgaaatcactatccagccaggagacatagtcatggtggatgaaagccaaactggagaacccggctggcttggaggagaattaaaaggaaagacagggtggttccctgcaaactatgcagagaaaatcccagaaaatgaggttcccgctccagtgaaaccagtgactgattcaacatctgcccctgcccccaaactggccttgcgtgagacccccgcccctttggcagtaacctcttcagagccctccacgacccctaataactgggccgacttcagctccacgtggcccaccagcacgaatgagaaaccagaaacggataactgggatgcatgggcagcccagccctctctcaccgttccaagtgccggccagttaaggcagaggtccgcctttactccagccacggccactggctcctccccgtctcctgtgctaggccagcctgacttcctcctccacccctccatgagactaggccacatgcagccccggattgtgcttctcttcccggaccccctgcagtgttccacctcgaggcttttgcccatgctgcgccctcggcctggagtgcccttcctccgaagccctagctgtcaaagtccttctcatccttcaaggcccatctcagatgctgccccctctgtgaaatttacgctgatgcccccaggcagaattcatccctgttttctctttattcctgcagtgaatagtaggaactcctttttaggatatttcattctgccaggtggtacacttggttgtttttatctctgtcttccccattacttgtgaattacctgctagtaatactgcccatctttatagtgctttgtggttaataaagtgcttttccctaaattaaaaaaaaaaaaaaaaaa

SEQ ID NO: 89 - DNA, 861 bp, Homo sapiens
gcacgaggtgatatcagtgcttatgaagaattggtatccaagctgaatttattagtggaggatgaactgaagcaaattgctgaaaatattgaaagcattaatcagaacaaagctccttcgaaatatataggcaactatgcaattttggatcatcttggaagtggagcttttggctgtgtttacaaggttagaaagcatagtggtcaaaatcttttagcaatgaaagaggtcaatttacataacccagcatttggaaaggataagaaagatcgagacagcagcgtaaggaatattgtttctgaattaacaataattaaagagcagctttatcatcccaacattgtacgttattacaaaacatttctggaaaacgataggttgtacatagttatggagctgatagaaggagccccgcttggagagcatttcagttctttgaaggaaaaacatcaccattttactgaagaaagactatggaaaatatttatacagctgtgcttagctcttcgatacttacacaaggagaagaggattgtccatagagatctgacaccaaacaacattatgttgggggataaggacaaagtaacagttactgactttggcctggcaaagcaaaaacaagaaaacagtaaactcacgtctgtggttggaacaatcctgtattcttgatgcaaagaaactgtggcaggctaacatgtaccttgtaagctgcaagcttatatgatgtctacttatcctcttaacagtaaggctgacctactcgttactttctgagagaagaataattttcttttgtttcactgtgtactgtttttataaaataaacaataaaatttgatcaaaaaaaaaaaaaaaaaa

SEQ ID NO: 90 - DNA, 968 bp, Homo sapiens
  SITE (888): n equals a,t,g, or c
  SITE (894): n equals a,t,g, or c
  SITE (941): n equals a,t,g, or c
  SITE (944): n equals a,t,g, or c
  SITE (956): n equals a,t,g, or c
  SITE (957): n equals a,t,g, or c
agcggccgcagagtcccggggtgcccatgcagacgccctgcttcacgctgcagtacgctgcccccgagctgctggcgcagcagggctacgacgagtcctgcgacctctggagcctgggcgtcattctgtacatgatgctgtcggggcaggtccccttccagggggcctctggccagggcgggcagagccaggcggccgagatcatgtgcaaaatccgcgaggggcgcttctcccttgacggggaggcctggcagggtgtatccgaggaagccaaggagctggtccgagggctcctgaccgtggaccccgccaagcggctgaagctcgagggactgcggggcagctcgtggctgcaggacggcagcgcgcgctcctcgcccccgctccggacgcccgacgtgctcgagtcctctgggcccgcagtgcgctcgggtctcaacgccaccttcatggcattcaaccggggcaagcgggagggcttcttcctgaagagcgtggagaatgcacccctggccaagcggcggaagcagaagctgcggagcgccaccgcctcccgccggggctcccctgcaccagccaacccgggccgagcccccgtcgcctccaaaggggccccccgccgagccaacggccccctgcccccctcctaatccccaccactgtgacccccttccctcataggggctgtgacctgggagcccggctcactcccggaggcctctgcctgcggctgacctgatccccaagggactgtcctttcctctcctaccccaccccactcccagacagagcagaagtatttttataagcagagaattttttatgtcttaccagatagagttgcagggaagggggggcctgctggggagtggggttkggggggccctnttccanggacactgscttttctggggcaaaaggccccttcaggggggactggntcnacagggaaaaanncccttccccca

SEQ ID NO: 91 - DNA, 955 bp, Homo sapiens
  SITE (550): n equals a,t,g, or c
  SITE (934): n equals a,t,g, or c
  SITE (942): n equals a,t,g, or c
  SITE (944): n equals a,t,g, or c
  SITE (948): n equals a,t,g, or c
ggttttctccattaatttctgctcgttttggaatgggaagcatgcccaatctgtccattcctcagccattgcctccagctgcacctataacatcattgtcttctgcgacttcagggaccaaccttcctcccttaatgatgcccactcccctagtgccttctgttagcacatcatcattaccaaatggaaccgccagtctcattcagcctttacccattccttattcttcttcaacattgcctcatgggtcatcttatagtctgatgatgggaggatttggaggtgctagtatacagaaagcgcagtctctgattgatttaggatctagtagctcaacttcctcgactgcttcactctcagggaactcacccaagactgggacctcagagtgggcagttcctcagcctacaagattaaaatatcggcaaaaatttaatactcttgacaaaagtatgagtggatatctctcaggttttcaagctagaaatgcccttcttcagtcaaatctttctcaaactcagctggctactatttggactctggctgacgntgatggtgatggacagctaaaagcagaagagtttattcttgcaatgcaccttactgrcatggccaaagctggacagccattaccactgactttacctcctgagcttgttcctccatctttcaggtgagtgtgcctggaggtggagaactatggttttgataacttggcagatgtgatttagaagagagttaaatatttgcactgccattgattttagtattcaacaagttatacttgaaaagggtacatattagaagtaggtgtgggccaggcgtggcagcttacgcctgtaatcataacactggggagccaaggtggggaggatcacatgaggccggggagttccaggaccagcgtgggacaacatagtgagaccccgtatcntaccaaantnaaantaattag

SEQ ID NO: 92 - DNA, 535 bp, Homo sapiens
  SITE (490): n equals a,t,g, or c
aattcggcacgagtcccggtggtgagggcagtggagcacccagcaggccgccaacatgctctgtctgtgcctgtacgtgccggtcatcggggaagcccagaccgagttccagtactttgagtcgaaggggctccctgccgagctgaagtccattttcaagctcagtgtcttcatcccctcccaggaattctccacctaccgccagtggaagcagaaaattgtacaagctggagataaggaccttgatgggcagctagactttgaagaatttgtccattatctccaagatcatgagaagaagctgaggctggtgtttaagagtttggacaaaaagaatgatggacgcattgacgcgcaggagatcatgcagtccctgcgggacttgggagtcaagatatctgaacagcaggcagaaaaawttctcaagagcakggwtaaaaacggcacgatgaccatcgactggaacgagtggagagactaccacctcctncaccccgtggaaaacatccccgagatcatcctctactggagcatt

SEQ ID NO: 93 - DNA, 647 bp, Homo sapiens
ctcggttgttgtagtcgcgatgttcttctccgaggccagagccaggtcgcggacgtgggaagccagtccctcggaacacaggaagtgggtggaagtatttaaagcatgtgatgaagatcacaaaggatatctcagcagagaggactttaaaactgctgttgtaatgctgtttgggtacaagccctccaagatagaagtggattctgtgatgtcttcaataaatccaaatacttctggtatattactcgaggggtttttaaatattgtcaggaaaaagaaggaagctcaacgatatcggaacgaagtaagacacatcttcacagcctttgacacctactatcgtggatttttaactttggaagatttcaaaaaagcatttaggcaggtggctcccaaattaccggaaaggactgttcttgaggtattcagggaagtagatcgagattcagatggtcacgtcagctttagagactttgaatatgccctgaactatggacagaaggaagcctaactattgtgaactacttttggtaactctggggagatcaatagattgtaatgtcagcagactctactctactaatgatgtcatgctacagacttgtgattaaacatttaaaaatttttaaaaaaaaaaaaaaaaaaaa

SEQ ID NO: 94 - DNA, 973 bp, Homo sapiens
  SITE (271): n equals a,t,g, or c
  SITE (836): n equals a,t,g, or c
  SITE (868): n equals a,t,g, or c
  SITE (964): n equals a,t,g, or c
atcctggagatcttcttcagacacctttttgctcaggtgctggacatcaaccaggccgacgcagggaccctgcccctggactcctcccagaaggtgcgggaggccctgacctgcgagctgagcagggccgagtttgccgagtccctgggcctcaagccccaggacatgtttgtggagtccatgttctctctggctgacaaggatggcaatggctacctgtccttccgagagttcctggacatcctggtggtcttcatgaaaggctccccanaggataagtcccgtctaatgtttaccatgtatgacctggatgagaatggcttcctytccaaggacgaattcttcaccatgatgcgatccttcatcgagatctccaacaactgcctgtccaaggcccagctggccgaggtggtggagtctatgttccgggagtcgggattccaggacaaggaggagctgacatgggaggattttcacttcatgctgcgggaccatgacagcgagctccgcttcacgcagctctgtgtcaaaggtggaggtggaggtggaaatggtattagagatatctttaaacaaaacatcagctgtcgagtctcgttcatcactcggacacctggggagcgctcccacccccagggactggggccccctgccccagaagccccagagctgggaggccctggactgaagaagaggtttggcaaaaaggcagcagtgcccactccccggctgtacacagaggcgctgcaagagaagatgcagcgaggcttcctagcccaaaagctgcagcagtacaagcgcttcgtggagaactaccggaggcacatcgtgtgtgnggcaatcttctcggccatctgtgttggcgtgnttgcagatcgtgcttactactatggctttgccttgccacccttcggacattgcacagaccaccctcgtgggcatcatccttgtcacgaggcacggnggccagcgt

SEQ ID NO: 95 - DNA, 757 bp, Homo sapiens
  SITE (659): n equals a,t,g, or c
  SITE (664): n equals a,t,g, or c
  SITE (756): n equals a,t,g, or c
ggtgacttcctcggccaggccgyctgcgcctctgggaccatgttgcgctggctgcgggacttcgtgctgcccaccgcggcctgccaggacgcggagcagccgacgcgctacgagaccctcttccakkywctggaccgyaatggggacggagtggtggacatcggcgagctgcaggaggggctcaggaacctgggcatccctctgggccaggacgccgaggagaaaatttttactactggagatgtcaacaaagatgggaagctggattttgaagaatttatgaagtaccttaaagaccatgagaagaaaatgaaattggcatttaagagtttagacaaaaataatgatggaaaaattgaggcttcagaaattgtccagtctctccagacactgggtctgactatttctgaacaacaagcagagttgattcttcaaagcattgatgttgatgggacaatgacagtggactggaatgaatggagagactacttcttatttaatcctgktacagacattgaagaaattatccgtttctggaaacattctacaggaattgacataggggatagcttaactattccagatgaattcacggaagacgaaaaaaaatccggacaatggtggaggcagcttttggcaggaggcattgctggtgctgnctctngaacaagcactggccctttggaccgtctgaaaatcatgatgcaggttacgggtcaaaatcagacaaaatgaacatatttgggggctttcgant

SEQ ID NO: 96 - DNA, 1021 bp, Homo sapiens
ccacgcgtccgctgaaatatgggctttatcagacctaaacaaggatgggaagatggatcagcaagagttctccatagctatgaaactcatcaaactgaagcttcaaggccaacagttgcctgtggttctccctcctattatgaagcaaccccctatgttttctccattaatttctgctcgttttggaatgggaagcatgcccaatctgtccattcctcagccattgcctccagctgcacctataacatcattgtcttctgcgacttcagggaccaaccttcctcccttaatgatgcccactcccctagtgccttctgttagcacatcatcattaccaaatggaaaccaccttcagtaccattagcccaccataccaagtaacaagttaggcaggaatcgtgggaatttattgagtcagctttgagtgtttgagagaatgtaaacaagattggctcgaattgtaaacgtttgtactttggatgagttcatggttctttaggtcaccttaataccagctatctttggtagaagctacagcattcagtttctctggaaactgtatcacatttttgcattttaaaaattttacagtatcaaaaaaccaaaatctgcttatgaaacaaaacatgaagcaggacatatttggattctatttatttaaaattaaattctttgcaaaattgaacttctcaactaaaacgtgtccatgtcagaattttaactgttagcaggtagtttgtggcaaagatggctaaataatgaagcaaattagaatctgtgtgtatactaatgagctgctttttttctgttgagactatcattatttgtcttattacccaagaggcaattacctgaatttggatgtctgaattataacttatgcaggaatagttctgtaaatacatttaaataaactgtaaagatatttaataaatatagtatttatactaaaaaaaaaaaaaaaaaaaaaaaaaaaaaaaaaaaaaaaaaaaaaaaaaaaaaaaaaaaaaaaaaaaaaaaa

SEQ ID NO: 97 - DNA, 4113 bp, Homo sapiens
  SITE (4084): n equals a,t,g, or c
gaatttttaatgtctttactggttggtttcacacgtgaatatcctgatattaaagtcgagctcacaactsacgactctcttgtcgatatcgtccaacagggctttgacgctggcgttcgacttagttgcatcgtcgaaaaagatatgatcagcgtggcgatcggcccgccagtgaaattatgtgtagcagcaacgccagagtactttgcaagatatggcaaaccccgccatcctcatgatctgcttaatcatcaatgtgttgtttttcgttatcccagcggcaaacctttccactggcaatttgcaaaggagctggaaattgctgtcgcaggaaatatcattctggatgatgttgatgctgaactggaggccgttttgatgggtgctggtatcgggtatctgctctatgaacagatcaaggagtaccttgatactggtcgtttagaatgtgtactggaagactggagcacagagcgtccaggcttccagatctattatccaaaccgccagtatatgtcctgcggcttgcgcgcatttctcgattatgtaaaaacgggtcagatctgccagagtcagcgtcaccgaccacaataattatttactattcgctttacgcgccagcagcgggaatatcagtcctaatcctaccagcacaaacggcgttgcaacattcagcgccaactggaaggtccactctgcagtgaaggcttccattttcgggaagatccccgtcaaacaggcaaaggcggtaaaggcaaaacaccaaatcccgacggtcattgccagaggcttattacgaataaagacatattctggtttatatttctgcgccaagcgaacgactgcaataaatgcaacaaatacccataaataacgcagcggcatcactaccgaattaaggttcaacagccatttatagagattgttcatatcaccaatgccgagagtcggcagcataatcagaatcgccaccagtaccagggtcagaaaatagccattaacgggcgtaccagaagcgttggtacgacataaactggctggaatatatttgctgtcagcatcacctaatagcactttaagcggggcatcaatcgagaataccagcgccgctacttgtcccagggtattcgcaatggcgtaaatcaccattaaagtattacccatgttgtaatactcgcccagcttctgaaaggcgtaatactgaccgttggtcattaagtcatccgggatattacgcgaatcaaacatcatccccatcgccagcgagcccagawtggcacaaaccgcaaccatcaccgccaggcataacatcccttttggaaattcttttcctgggttgcgcgtttgattaacgtaaggagaaatcttctctgctccgccaaccgcgaaaaccagcattgaaatagtggtaatgtaggtaaagtcgatatgaggaatgaacgtttcccaggtaatgtttgtggtcgcaatatgcacttcagtaattgcaggcgcggttaccgccatcgccacatacaggagtgacataacaaacatagcaatccctgccacagaaccgacgattttcagcgatttcataccgcgtgaagcaacccacataaagaagataaacagcaccagcgttaacccctgtaacgctacgactgaatattctttgattagcgaaccgtcgcctttcatcgcccaaccgagcgcaatcagaattgcctggggtttttgtgccagatagggaatatgcaccacccagtaggtccacgcggcgagataagccagtccgggtcccatcgtgtgtttaatccaggtactgaccccgcccttcccatctttgaaggtcgagcctaactgaccaacaattagcgcataaggtgtgaaatagagtgcaaagataaacacccatgaaaaaacaaccaccagcccctggttggcatagttattaacaacgttgccaaaaccccagacagtgataaaagacatcagcgcaatgttgtaccatcgcaactgtttttcctgaacattcccagccatagacaaatccttcgccaaaattaaaggggcatcggtaaaacgagggattatgcgcggcaaataagaagtgcggaaatagcgaaatgcaaaattataacctgctgcacattttatttttaaacgaataaaatttggaataaagcaagtcagatagaagaaacaaaaaagcagagtgtgaaacagtaagttcacactctgcttgaattcatttacacgtgagcaacgggtttcggcgtatgaccggcgttgcgcarcagcatcagcaaatagatwaacgatacgctggcgatcatgatamacaatwaattatcggagaaattctgcattagcatagcggtaaatracgggccaagcagacttcccacagtatagctcaacagtaaggcctggttcatcgccaccagttgatgatgttcaactttytcgcaagcccatgccatcgccaccggatatagcgtaaagccagcggcaccgaggatgaataacgctggggccatcgccgcctggctaagcatcgcgatactgccgagaatgacgacaaagacctgaacacgcaacaccagcagtcgaccaaacttatccgccagacgtccaatcggccattgtccaaggatacccgcactgaccagtaccgccatccagaaaccaatgctggcattgctcacccctttgtgattgaggtacagcggcatcaggccatatagagmtcccagaacgattcctgagataatgcagccattcacgccaagccgcgcctgacggagttttagcattgacgtaattgacgtcgaatcatggttttcagcctgctgattcagcacacgcgtaaacaacagcggtaagatccctgccaacgtcaaacctgtaacccacggcaatacggacatcagctcggttgaaactttgctgaccagtaactggcctaaaaacgttcccacgtaataaaccatcatatacgcagcaagcaaacgcccacggttacgtgacgtcccactgcacatcagcgcgctctcaacaaccacccaaatcatggcacagccgacgcccgcgacaaaacgccaagccaaccagctccagaatccaatcatcaggccaaggccggcacagccagcggcaaaaatgaaggaggccagataatagctgcggttaaagccaatgcgcttaatgacataccctgtcagcaatgtaccgacaaggttgccggtaaaataggatgagctgacaacgcctacctgccatgtggacatgtgttcctgggcgagccaaagcggcacgagtgtatttaacaccgcaatcgccagagtcaacaaaagcaggccagacagcaaaagcatgacaggctgggtatacgtggacatgaattaaaaccgtgaggaagttcaaatttcatgcgcatcatgccaccgccaaaaacattgtcaatgggtgaaaatacgcgatatcccagcggcggtattatcgatttatattactcrttcataacgctaatgctgaagagatgattagtctcatctgattgtttttattgaactaacacaaatttcatacgcttcgttcagtcgaaaaatttcatggtcacagcaaactcatatttcccgtctatgctttcagagcaatgcatcgcgtctgatcgatttcagacgtaccactgactctcgaaaggagaagaggatgaccaaaccgtatgttcgtcttgataaaaatgatgctgccgttttgcttgttgatcaccaggctggtttactttcccttgtacgggatatcgaacccgataagtttaaaaataacgtgctggcgctgggtgacctggctaagtatttcaacttaccaactattcttaccaccagttttgaaaccggtcctaacggcccattagttccagaactgaaagcacaattccccgatacaccttacattgctcgcccgggaaatattaacgcctgggataacgaakattttgtaaaagctgtcaaagcgacaggtaaaaaacagttaattattgccggtgtggtaaccgaartttgcgtggcattcccggcgctttcagccatttaagaangggtttgacgtctttgtcgtgactgggac

SEQ ID NO: 98 - DNA, 489 bp, Homo sapiens
  SITE (442): n equals a,t,g, or c
  SITE (473): n equals a,t,g, or c
  SITE (483): n equals a,t,g, or c
  SITE (489): n equals a,t,g, or c
ctcattaagactgtaaataaaccacctgggtctgcagatattcatgcaagccatgtttaccatctgcgccgccaataccggatttacgccatccggcgtggaagccttgcatagcttcgaagttttcacggttgatgtaagtttcaccaaacttcagccctttaatggctttcatcgcgacgttcagattttgggtatagattgatgaggtcaggccgtaatcactgtcattagccattgagatagcatcttccagcgtgtcaaatgcgacaactggcagcaccgggccaaaggtttcctcatgcataatcgacatttcctggcgaacatccagcagcaatgtcggcggataataatatcctttcccctctaccgctttgccaccgaacgccaccatcggcaatatcatgaatttaagccgccccaccattccagccaccgnccggcagccaatgcaaatgatcgcaaatatnatgactaatnatgggn

SEQ ID NO: 99 - DNA, 2592 bp, Homo sapiens
  SITE (18): n equals a,t,g, or c
atagggcgaatttgggtnccgggcccccttttttttacacaatataaatgctttattgctagcacagaggtttctttttaagtaaattaaaagaaataaatcttcattttcacattttttgttgcagtccaaaggtaactagttggttagtggctatgtccacttggacacatgctacaggagggcagcattcacatggaagcactcagaaatacggcatctgtcagggctcacggcactgggctgctgaatgcactgtcgtttgtaaataacagcaagtggagactttaaaacatcatggatagataagagttataaatagaaaactggtacggttaagaagcagaagatcgttaaatacagaaggctatatatatgttgcccatattccacawactctgggttatgtttggtacttttaaataaatgatctgcatytaggttagagactggattggatttgacagctggaaagatggaagaagggatggaagaaggaaaggaagctaacacttcccacatcaaactggtggagtcactggaaagcagaagaggagtatgtggatgggaagaaagggaggcgggcctgctttactccctgcaagctgtaggccatggcctgcccagtgaggggcaagaatggggtgtgacagaggagctcagtggagcacggcagtcctggcacaatggaacttggcaaatggaaaaggaaacccctaggcttggccagattttccaaggtcactgccaatagatacagggcacattatgatagatgtacagtgtgacagaccaaaatcacacctgcagcagttattggtgtagaggttcagaaggtacagattccaactacagaaataattcatttaataataattgttgcccaatattagaaactgaatgatgtctgcaaggcatccagcattatcaaattcttgggcctactcggattgttttttggttggttctaagaaaaactttggaaaagatcttatctagctatgaaaaacmacccactccttgccttattccagaataactgagaaggaatctaatacacacacaccccaaaactgcagcaagctcagaagcggtgaactgcacrtgatgacttccagtctctattgtcccaatcttttttcattcatgttatttatgggtaaaagaaaaccagatkgggtcaggaatatcccaggttcttactacatctgtagtgtaccagctcctggcattttcattctggtctgactctagctaaaaccatttcatgttttgctttgaagaaatggataacatgaaatgataatttggctttacaaccttgaaaaattgttcccggcccaaacatctgccccagaatgagctcagctgacatctccttggaagagagggaggggtgggtgagcgaggagggcctggaaggaggaaaatgaagacaggagaaaggtcacctttccttgagaggaaagttctttgtgacaaagacatgaaataatacagctcccttatttcatcctgtgctccagaaggagatactggatgtgtctgctagctcctcctcctccctttatcccactttccccaatatttggtatgattaaggtggccccttacagagtgccaagaaactgtacccagctggtttgctttagttgtgcagtgacctgcctggcctacatgttatcttttcaatctttaagtaaggaccgtggctcaactttgtattcctgagagctgggccctacagagaaagcagagagggacagacgtgcaggctgggcttcatcctccttcttggccttcttaggagttcttctgggggatctttactgtcaccgtcttaacttctgagtactcccgcaagccaaattctcccatttctctcccatttcccagacatcttgaatcccccaaaggggctctgggcatttaaggcattgtaacaattgatccaaacagtcccagcttgcattgcagaagacactgtgagggccttgttgatgtcattagtaaagacagctgctacgagtccaaagtctgagttattggctctttcgataacttcatccatcgtcttaaatctcaaaatttcctgaacagggccaaagatctcctccttggcaatccgcatatcatcagtgacgttggaaaacactgtgggctcaatgaaaaacccctttcggcccagtcctttgcctccacattccagcttggcgccctcagccacaccactctggatgagttccaagatcttgttgtactgtttcttatcaatctggggaccctgctcagtggtggggtcaaagggactccccactatgcgcctcttggcccgctccacgcttcttctcacaaactcctcatagatggactcctccacgaagatgcgagagcctgcagtgcagcactgaccttgattgaagaacacaccctggtgggcctgctccacagcatagtccaagtcagcatcagcaaaaataatattaggacttttgcctccaagttccagagttactctcttcaaattacttcttccagctgcttcttggataagctttccaacctcagtagaccctgtgaatgcaatcttgt

SEQ ID NO: 100 - DNA, 556 bp, Homo sapiens
  SITE (33): n equals a,t,g, or c
  SITE (467): n equals a,t,g, or c
  SITE (488): n equals a,t,g, or c
  SITE (503): n equals a,t,g, or c
  SITE (541): n equals a,t,g, or c
ctgaagaccacgttaagctcgcaattaaccctnactaaagggaacaaaagctggagctccaccgcggtggcggccgctctagaactagtggatcccccgggctggctgccgccatcggcccgaccatctttgtggatgtggacccgaatgcgtccttaagtcgcgaagagattttcggtccggtgctggtggtcacgcgtttcacatcagaagaacaggcgctacagcttgccaacgacagccagtacggccttggcgcggcggtatggacgcgcgacctctcccgcgcgcaccgcatgagccgacgcctgaaagccggttccgtcttcgtcaataactacaacgacggcgatatgaccgtgccgtttgggcggctataagcagagsggsaacggtcgcgacaaatccctgcatgcccttgaaaaattcactgactgaaaaccatctggataagcctggaggcctgnaatgaccgacataccagcagntactacgccggcagngcgaataaatatgcaccattcgacacgctgaatgaagncaatcacctgggacg

SEQ ID NO: 101 - DNA, 715 bp, Homo sapiens
  SITE (670): n equals a,t,g, or c
  SITE (680): n equals a,t,g, or c
  SITE (682): n equals a,t,g, or c
  SITE (691): n equals a,t,g, or c
ggcacgagggaacttggaggcaaaagtcctaatattatttttgctgatgctgacttggactatgctgtggagcaggcccaccagggtgtgttcttcaatcaaggtcagtgctgcactgcaggctctcgcatcttcgtggaggagtccatctatgaggagtttgtgagaagaagcgtggagcgggccaagaggcgcrtagtggggagtccctttgaccccaccactgagcagggtccccagattgataagaaacagtacaacaagatcttggaactcatccagagtggtgtggctgagggcgccaagctggaatgtggaggcaaaggactgggccgaaaggggtttttcattgagcccacagtgttttccaacgtcactgatgatatgcggattgccaaggaggagatctttggccctgttcaggaaattttgagatttaagacgatggatgaagttatcgaaagagccaataactcaractttggactcgtagcagctgtctttactaatgacatcaacaaggccctcacagtgtcttctgcaatgcaagctgggactgtttggatcaattgttacaatgccttaaatgcccagagcccctttgggggattcaagatgtctggaaatgggagaaaaatgggaagaatttggctttcatgtgaatgcttgnccttcctggnancatggtgtnccaagtggacattagccacttacc

SEQ ID NO: 102 - DNA, 467 bp, Homo sapiens
gcaattctgatgcctagaagaaatgaagacaaccaaaaatgatgaaatgaggggtacacgtgcagatttattgcatgagaatattgcatgatgctgaggttttgggtacaaatmccatcactcagataaatggcaagcaaaaaacgagaagtccagttacagacagtcatcaataatcaaagcctgtgggatgagatgttgcagaacaaaggcttaacagtgattgatgtttaccaagcctggtgtggaccttgcagagcaatgcaacctttattcagaaaattgaaaaatgaactgaacgaagacgaaattctgcattttgctgtcaagctgacaacattgtgactttgcagccatttagagataaatgtgaacctgtttttctctttagtgttaatggcaaaattatcgaaaagattcagggtgcaaatgcaccgcttgttaataaaaaagttattaatttgatc

SEQ ID NO: 103 - DNA, 1413 bp, Homo sapiens
ggcacgagaagaaattccattcaaatttatctacttaacgtagccattgcagacctcctactcatcttctgcctccctttccgaataatgtatcatattaaccaaaacaagtggacactaggtgtgattctgtgcaaggttgtgggaacactgttttatatgaacatgtacattagcattattttgcttggattcatcagtttggatcgctatataaaaattaatcggtctatacagcaacggaaggcaataacaaccaaacaaagtatttatgtctgttgtatagtatggatgcttgctcttggtggattcctaactatgattattttaacacttaagaaaggagggcataattccacaatgtgtttccattacagagataagcataacgcaaaaggagaagccatttttaacttcattcttgtggtaatgttctggctaattttcttactaataatcctttcatatattaagattgggaagaatctattgaggatttctaaaaggaggtcaaaatttcctaattctggtaaatatgccactacagctcgtaactcctttattgtacttatcatttttactatatgttttgttccctatcatgcctttcgattcatctacatttcttcacagctaaatgtatcatcttgctactggaaagaaattgttcacaaaaccaatgagatcatgctggttctctcatctttcaatagttgcttagatccagtcatgtatttcctgatgtccagtaacattcgcaaaataatgtgccaacttctttttagacgatttcaaggtgaaccaagtaggagtgaaagcacttcagaatttaaaccaggatactccctgcatgatacatctgtggcagtgaaaatacagtctagttctaaaagtacttgaggtaaacatactaaaatgaattatataatgcagcctcttaattctttgaagaactaaaaaattaggaaacaaagttctagcatttacaaaactcagatctcaaagctctgcttgtatttgtgatatttcatttgcttaactgtaaaccatttcaaggtactaacttttaaatctgtatgtaaaatcttttcaaaatacatttttaagctaatactcttaacatagattatgaagttaagtgaaatttatggctctaacagcaaaataattaaagtgccatagtttctcaagtgactaaagtagttattaaaatcaagcacttgatactaatttgaagtgtgtttaaaagtaaatgatttgggaactgacaatgtgtcagaaaatatatgttcatttatcattttaaaatcttgtataatttgccactgtattcatttatgcctaaatctctataacagatgaaaagataattaataaaatcctaattaaaaaatgaaaaaaaaaaaaaaaaaa

SEQ ID NO: 104 - DNA, 2834 bp, Homo sapiens
gaattcggcacgagccttactcgtatatttaaaatatctgatcaagataatgatggtactctcaatgatgctgaactcaacttctttcagaggatttgtttcaacactccattagctcctcaagctctggaggatgtcaagaatgtagtcagaaaacatataagtgatggtgtggctgacagtgggttgaccctgaaaggttttctctttttacacacactttttatccagagagggagacacgaaactacttggactgtgcttcgacgatttggttatgatgatgacctggatttgacacctgaatatttgttccccctgctgaaaatacctcctgattgcactactgaattaaatcatcatgcatatttatttctccaaagcacctttgacaagcatgatttggatagagactgtgctttgtcacctgatgagcttaaagattatttaaagttttcccttacataccttgggggccagatgtgaataacacagtttgtaccaatgaaagaggctggataacctaccagggattcctttcccagtggacgctcacgacttatttagatgtacagcggtgcctggaatatttgggctatctaggctattcaatattgactgagcaagagtctcaagcttcagctgttacagtgacaagagataaaaagatagacctgcagaaaaaacaaactcaaagaaatgtgttcagatgtaatgtaattggagtgaaaaactgtgggaaaagtggagttcttcaggctcttcttggaagaaacttaatgaggcagaagaaaattcgtgaagatcataaatcctactatgcgattaacactgtttatgtatatggacaagagaaatacttgttgttgcatgatatctcagaatcggaatttctaactgaagctgaaatcatttgtgatgttgtatgcctggtatatgatgtcagcaatcccaaatcctttgaatactgtgccaggatttttaagcaacactttatggacagcagaataccttgcttaatcgtagctgcaaagtcagacctgcatgaagttaaacagaatacagtatttcacctactgatttctgcaggaaacacaaaatgcctccaccacaagccttcacttgcaatactgctgatgcccccagtaaggatatctttgttaaattgacaacaatggccatgtatccgtaagtacttgctgtcttcattttcatgttgcatggttcataacattgcatgccattattagccatgaagggaatatctttgtcacataggaattgttcagcaacagaaagatactttgtaatgagaaggtacaaatttgagtaaatgcaagtttggtttgaatgccataataaaatgatataaacagtgcttctgacaatatctgtatatttttgagcaggctgtaactatcttaatagaatagtacaataaaacacaaccccccacccagcattaaaaaatagttttactggaataaaatgggtttggcatcatgttgttttatgcttataaagcattttcatatgaacagaaagtttatatttttctgtttttgaccttaggtatatgaagttttctaaaatattttattaatttatgttgaaattgtgggtatgcttcagttaggatatgtcttttttaagtgctgtaaagagtagttgtaattggaatttctactgtataaatgttttacattaagtgttacgagccacaaatttcatgtacatttattatatatctatacatgcatatgcacaagcacataactgtggtcatctctgtagtttactaactgccttaaaattgcatggttttaatggcattcgcctcagtagtgtgtttgtataaattctgttttgtaacaaaatagtttttcaggcagtgcgtttctcaggactttatagcttattctacttattcttatgttagtctctaaattatttttcttcttatgaaaactacagtgtaacacagagtaataatcaaacattgctataaaccaagaatgacatttttcaaaaaggtgttgatttgtacagatttttaaagtcagttaactttactgctattttattacctaatactttttttagatgcaacaaacccttgaatttctatttgtattcgaagacaagtcattcctattattatagaataaccaaaaccttatttatgttttacctttgctttaaaactctcatgtatgttatctacagagaggatcattacagagacagactctcccgagacatgggccacactgatagaatagagaatttgagaaaaatctgggtctttctaaaaactgctttgtaagttactttttctttatgacttctgtgggattttgttgatattttcttagagaatgaccaaatctcctttcttgccataattaacatttagtaattatgtagaaacgcactgcttggtcaggcttcctgcctagctatatattacgttgtcttccttactacataaatgtacttctttaatcttgtgattacagtaactgcaagtgtgtttttacatctgcatttttaaaacattttactgtaattctgttgtgtgtgtgtgtgttatatgataaatgtacatacatggaccacttgtttatatggttaatcccaaactacttctcatgaagcatctccctgttgctaagcatactttgcatctctcctttttggtgggtggagccttgtgtatgttaaagaatcagatttgatttataaaataacagatggattccagtatgacagctggcagagacttagtagcagtgatttgttcatcatcacaagtcaaaaaaaaaaaaaaaaaa

SEQ ID NO: 105 - DNA, 526 bp, Homo sapiens
  SITE (524): n equals a,t,g, or c
  SITE (525): n equals a,t,g, or c
  SITE (526): n equals a,t,g, or c
gggcccccggttgccactaagcccgaaaaggtgggggagctgtgcttctctttccggtacgtccccagccaagccgggttgaccgtggtggtgctggaggcttaaggcctgcgtccaggacttgcagagccttacgtgaaggtccagttcatgttgaaccagaggaagtggaagaagagaaagacagccaccaaaaagggcacggcggccccctacttcaatgaggccttcaccttcctggtgcccttcagccaggtccagaatgtggacctggtgctggctgtctgggaccgcagcctgccgctccgaactgagcccgtaggcaaggtgcacctgggtgcccgggcctcggggcagsccctgcagcactgggcagacatgctggcccacgcccggcggcccattgcccagtggcaccccctgcggccagccaggggaggtgggaccgcatgctggccctgcagacccccgccctgcagggaccattgcaattaaacgcctttttccttgccaaaaaaaaaaannn

SEQ ID NO: 106 - DNA, 406 bp, Homo sapiens
  SITE (333): n equals a,t,g, or c
  SITE (372): n equals a,t,g, or c
  SITE (388): n equals a,t,g, or c
  SITE (390): n equals a,t,g, or c
cggccttcgrggtcggtgcttgctcggcctggacgcgcgcgacggcggccttccagatcgagccggaggtcatcgtcgaggacggcgacgaccgcgcggtgatgcactgggcgcccatcggggtcgtcggggcgatcgggccgtggaactggcccatgatgatctcgatctggcagatcgcccctgcgctgcgcatgggcaatgcgatcgtcgtcaagcccagcgagcagaccccgctgtccgtgctggccctggcccacgtcattgaacgaggttgctgcccgaggggctgctgcaggttgctggccggttgacgcgaagttcggacgcgcntttcaattcccaagaaggggatcgacatgatcaactttnaacgggttccttgganancggcaaagggatcatt

SEQ ID NO: 107 - DNA, 777 bp, Homo sapiens
aaaagcactcgttgatcaaggtgttaagactagtttgcctccaatccgtgtgtaatagtgggctcaaacaaaaagttttggattattacaaaagagagattctccagacatacggctatgagcacatattgaccttacacaacctggagaaggccggcctgctgaaaccgcagacggggggcagcaacaattacccaactatacggaaaacattacgcctctggatggatgatgttaatgagcaaaaccccacggacatatcgtatgtgtacagtgggtatgccccgctcagtgtgcggctggcccagctgctttcccggcctggctggcggasatcgaggaggtcctccgcatcctcccagggccccactttgaggagcggcagcactgcccacaggactgcagaagaaacgtcaaccgggagaaaaccgagtgactctgatatttttccttgggggcgtaaccttcgctgaaattgctgccctgcgatttctctcccagttggaagatggaggtacagaatatgtcattgccaccactaaactaatgaatggaaccagttggatagaggctctgatggaaaaacctttctaggatgttcagaggagacttaacaagtgtactgcagaataaactacctctttraagaaattgctgaaaggaagtaaaaccccatagaagaaacatgggaatacagaatatattctggggtcagcttcttaaattatactactgtttactgctttctccgtctcttttgtattccctttttttttt

SEQ ID NO: 108 - DNA, 933 bp, Homo sapiens
ggagaccccaccttaggacctgagagattgaactgtgtaagcgccattcagctgcgagtgcattcttggactgccttgtgagcatccccggtctgggcaggaccctctccttcccatctttctataccacccagcccagccatggcactgaaaggccgagccctctatgactttcacagtgagaacaaggaggaaatcagcatccagcaggatgaggacctggtcatctttagcgagacctcactggatggctggctgcagggccagaacagccgtggggagacagggctctttcctgcctcttatgtggagatcgtccgttctggcatcagcaccaaccatgctgactactccagcagccctgcaggctctcccggagcccaggtgagcttgtacaacagccccagtgtggccagcccagctaggagtggtgggggcagtggcttcctctcaaaccagggtagctttgaggaggatgatgatgatgactggkatgactgggacgacggatgcacastggtggaggagccacgggctggtgggctgggcaccaacgggcaccctcccctcaacctctcctaccctggtgcctaccccagccagcacatggccttccggcccaagccaccactggagcggcaggacagcctggcatctgccaagcgaggcagtgtggtgggccgtaacctcaaccgtttctcatgctttgtgcgttctggagtggaggccttcatcctgggtgatgtgcccatgatggccaagatcgctgagacatactccattgaaatgggccctcgtggcccccagtggaaggccaatccccacccatttgcctgctctgtggaggaccccacaaaacagaccaaattcaagggcatcaaaagctacatctcctacaagctcacaccccatcctaaaaaaaaaaaaaaaaaa

SEQ ID NO: 109 - DNA, 977 bp, Homo sapiens
  SITE (960): n equals a,t,g, or c
gggcggggcgcggcggctgtcagctgactgtggcggcggcggcctcgaggtgacaactgtctccgtcgcaggctccggcgggggcgcaggaggtcgcccggcgcgtcactgtcgggtcggcgagccacgggggccgccgcagcaccatggcgaccaccgtcagcactcagcgcgggccggtgtacatcggtgagctcccgcaggacttcctccgcatcacgcccacacagcagcagcggcaggtccagctggacgcccaggcggcccagcagctgcagtacggaggcgcagtgggcaccgtgggccgactgaacatcacggtggtacaggcaaagttggccaagaattacggcatgacccgcatggacccctactgccgactgcgcctgggctacgcggtgtacgagacgcccacggcacacaatggcgccaagaatccccgctggaataaggtcatccactgcacggtgcccccaggcgtggactctttctatctcgagatcttcgatgagagagccttctccatggacgaccgcattgcctggacccacatcaccatcccggagtccctgaggcagggcaaggtggaggacaagtggtacagcctgagcgggaggcagggggacgacaaggagggcatgatcaacctcgtcatgtcctacgcgctgcttccagctgccatggtgatgccaccccagcccgtggtcctgatgccaacagtgtaccagcagggcgttggctatgtgcccatcacagggatgcccgctgtctgtagccccggcatggtgcccgtggccctgcccccggccgccgtgaacgcccagccccgctgtagcgaggaggacctgaaagccatccaggacatgttccccaacatggaccaggaggtgatccgctcctgctggaarcccagcgagggaacaaggatgccgccatcaacttccttgctgcaagatgggngaagagccatagagcct

SEQ ID NO: 110 - DNA, 706 bp, Homo sapiens
ggcttatcgtgaacctggccttggtggacctgggactggcactcactctccccttttgggcagccgagtcggcactggactttcactggcccttcggaggtgccctctgcaagatggttctgacggccactgtcctcaacgtctatgccagcatcttcctcatcacagcgctgagcgttgctcgctactgggtggtggccatggctgcggggccaggcacccacctctcactcttctgggcccgaatagccaccctggcagtgtgggcggcggctgccctggtgacggtgcccacagctgtcttcggggtggagggtgaggtgtgtggtgtgcgcctttgcctgctgcgtttccccagcaggtactggctgggggcctaccagctgcagagggtggtgctggctttcatggtgcccttgggcgtcatcaccaccagctacctgctgctgctggccttcctgcagcggcagcaacggcggcggcaggacagcagggtcgtggcccgctctgtccgcatcctggtggcttccttcttcctctgctggtttcccaaccatgtggtcactctctggggtgtcctggtgaagtttgacctggtgccctggaacagtactttctatactatccagacgtatgtcttccctgtcactacttgcttggcacacagcaatagctgcctgaacccaattgtctacgtcttaagccg

SEQ ID NO: 111 - DNA, 2382 bp, Homo sapiens
tttggctccaccttacttattattattgccgtgttaggctatatctattcaattcagactacagagtgggcgattttaatctatggactggtgatgatcttctttttatacatgtatgtttgcttcgcgtcggcggtttatatcccggagctttggccaacgcatttacgcctgcgcggttcgggtttcgttaatgccgtcggacggatcgtcgcagtcttcacgccctatggcgttgcggcattattaacacattatgggtcgatcacggtgtttatggtacttggtgttatgttattgctctgtgcgctggttctctccattttggcatcgaaacgcggaaggtgtcgttggaagagatttctgaggtgaattaaatctttcgttgatggcatcaattgccagatgtgccactgacgtgttttatttggcctacaatgccagtacagaattgtaggccagcgtaaaattagccctgtgtctcttcccagtctgccagcgtatatagcgttgccccagctgctgacatctccataaacgcgtgcgcactgtcctggggctggatattcacgccacgacaaccatcggtaatcacgtttaccttataacctaactgtaacgcgtccagcacggtaaacttcacgcaatagtcagtagccaggcccataacgatcaattcatcgatttcatgatcgcgtaaccagtcatcgacagaggttttctgccgacggccgttatcaaaaaaggcactgtaactgtcaactaaaggattttcgcctttatggaacaccgctgcgatcgctttttggtgcagtaacggatgtaattgtgcgccttcactgttctgcacacagtgatctggccacaaggtttgtggcaaaccgtcgaattggcctggcgtataaggctctacaccgtgctgactggcaaaactgccgtgattcgccgggtgccagtcctgactggcgataaccgcttcaccgtcgcgactggcaccagctcaatcaggcggtctagcgacatccaccgtactgtcaccttccggcacggcgacgcgccaccaccacagaaatcatttggtaaatcaaccattaacagggcgcgagggggcattacagtctccttaatcatccggcgtcagttcgccgcgcaggttttggctcatggtcttgcgaatggtttcagtatccagttcctggctaagcaggtaatgcagtttggttagcgtggcttctacagtcatatctgcaccgccaattacgccggcatgggcgagggcgttaccggtggcataaccacccatgttcactttaccggacatacattgtgtcaggttgaccaccacaataccgcgatcgctggcttcttgtaattcctgcaggaaggctttgttttgtggcgcattacccacgccataggagcgcagaatcaatgctttcaccggttggcgcagaaaattgcgcacgacgtcagcagaaatccctggataaatcgtcactacgccaattggttgtggggtgattggatgaacgattaattccccttcaccgtgcggggcgggtggcgtattcaaacgacgaatatggatacctgcttccagtaacggaggaaggtttggagaggcaaacgcatcaaaaccatcggcatgggctttggtagtgcggttgccgcgatacaatcggttattgaaaaagagcgttacttcgttgatcggataattcgccgcaacgtacaacgcattcagcagattaatttgtccgtcagagcgtaactcagccagcgggatttgtgaccctgtcacaatgaccggtttaccgagattctcgagcatgaacgacagcgcagaggcggtaaacgccatcgtgtcggtgccgtgcagaatgacaaaaccatcatagtcgtcatagtgcgctttaatatcttcagcaatatgctgccagtcttccggcgtcatatctgaagaatccatcagcggcgtatattcatgaatggtgaaatctggcatctccgggcgatggaattccggttttaccgccgaagccgaccaactggagttactgtcgcgtagtaaaaccgtcaccgtgcctaaggtttgggcagttggcgctgaccgtgactacagttttctggtgatggattatctcccacctcgtccgctggatgcgcatagcgcatttattcttggtcagcaaattgcgcgtttacatcaatggagcgaccaaccacaatttggccttgatttcgataacgcgctctccacaactccacagcccaacacctggcaacgtcgctggtcaacgttttttgctgaacaacggattggctggcagttggaactggctgcagaaaaagggatcgctttcggcaatatcgacgccatcg

SEQ ID NO: 112 - DNA, 758 bp, Homo sapiens
aaaacaatgaacaagaagattcattccctggccttgttggtcaatctggggatttatggggtagcgcaggcacaagagccgaccgatactcctgtttcacatgacgatactattgtcgttaccgccgccgagcagaacttacaggcgcctggcgtttcgaccatcaccgcagatgaaatccgcaaaaacccggttgcccgcgatgtgtcgaagatcatccgtaccatgccaggcgttaacctgaccggtaactccaccagtggtcagcgtgggaataaccgacagattgatattcgcggtatgggtccggaaaacacgctgattttgattgacggcaagccggtaagcagccgtaactcggtgcgtcagggctggcgtggcgagcgcgatacccgtggtgatacttcctgggtgccacctgaaatgattgaacgtattgaagttctgcgtggtccggcagctgcgcgttatggcaacggcgcggcgggcggcgtggttaacatcattaccaaaaaaggcagcggcgagtggcacggctcctgggacgcatatttcaatgcgccagaacataaagaggaaggtgccaccaaacgcactaactttagcctgaccggtccgctgggcgacgaattcagcttccgtttgtatggcaacctcgacaaaacccaggctgacgcgtgggatatcaaccagggccatcagtccgcgcgtgccggaacgtatgccacgacgttaccagccgggcgcgaaggggcccg

SEQ ID NO: 113 - DNA, 309 bp, Homo sapiens
  SITE (300): n equals a,t,g, or c
  SITE (304): n equals a,t,g, or c
  SITE (309): n equals a,t,g, or c
gcaagctctacgactcgctgctcgccctggacggtcacatccaatcagcgcgggccctgatggtggtggccgtgctcctgggcttcgtggccatggtcctcagcgtagttggcatgaagtgtacgcgggtgggagacagcaaccccattgccaagggccgtgttgccatcgccgggggagccctcttcatcctggcaggcctctgcactttgactgctgtctcgtggtatgccaccctggtgacccatgagttcttcaacccaagcacacctgtcaatgccaggtatgaatttggcccancccntgttn

SEQ ID NO: 114 - DNA, 963 bp, Homo sapiens
ggcacgaggtctgtagtctcatctgaaagctcagctggggcaggatccactcccatgcttactgacatggttgctggcaagattccattccttgaaggtttttgcactgagggcctcagttccttgctggctgttggccagaggctaccttcagttccttgccaagtggccttctccatcaaagcaaatatatgagaagggccagggaaagagaacaccaagacagaagtcacagtcttttatcacctgacctcaaaagtgacaccttatcacttttgctgtcttctagtcattagaagtgtccttgtgactctgtggattattgaccgcctggggcgcaagaagaccatggccctgtgctttgtcatcttctccttctgcagcctcctgctgtttatctgtgttggaagaaatgtgctcactctgttactcttcattgcaagagcgtttatttctggaggctttcaagcggcatatgtttacacacctgaggtctaccccacggcaacgcgggccctcggcctgggcacctgcagcggcatggcaagagtgggtgctctcatcactccgttcatcgcccaggtgatgctggaatcctctgtgtacctgactctggcagtttacagtggctgctgcctcctggctgccctggcctcctgctttttgcccattgagaccaaaggccgaggactgcaggagtccagccaccgggagtggggccaggagatggtcggccgaggaatgcacggtgcaggtgttaccaggtcgaactctggctctcaggaatagtgaccgatgggggactgagctggtctttgaggctgcagagcttggggggctggcaggccccaactggggcactgattgtcactgccgacatcaagaactcacccaagagtatgacctggaccaacagggttttgtgtcttgacaaaaaaaaaaaaaaaaaaaaaaaaaaaaaaa

SEQ ID NO: 115 - DNA, 727 bp, Homo sapiens
  SITE (413): n equals a,t,g, or c
  SITE (621): n equals a,t,g, or c
  SITE (684): n equals a,t,g, or c
  SITE (690): n equals a,t,g, or c
  SITE (699): n equals a,t,g, or c
  SITE (711): n equals a,t,g, or c
  SITE (723): n equals a,t,g, or c
ggaacatcctggacaagaattagagattgagctctttgatgaagacccagacaaggatgactttttaggaagtcttatgattgacctcattgaagttgaaaaggagcgccttttagatgaatggttcactctggacgaggttcccaaggggaagctacacttgagactggagtggctcacgttaatgccaaatgcgtcaaacctcgacaaggtgctaacagacatcaaagctgacaaagaccaagccaacgatggtctttcctctgcattgctgatcttgtacttggattcagcaaggaaccttccggtaggtaacacagtggtaacacctgtgggtgcgtatttcctagcagctgctcttgcttwtaaccactgctttgtgcagcactctgcatcacctgttctcttcttgntgtgttttcacttcacgtccaagtgcaggagagtggcagtggagagggagaagttagtgtttgctctgggagtgcatacatttctatttacacatttagctggatttgtgcagtacataggaaaagaagatgaatagtggttaggagaagaggttaactctctagaaaatcactaagcattaaaacttaattgccttaggatggaaantggctctctttggaatgggaataaaatgaacagctctgattaccaaatgcagaatcctcatgnttgcgnaaggcccgngcctgaacttgntgggccctggcnaccg

SEQ ID NO: 116 - DNA, 724 bp, Homo sapiens
  SITE (583): n equals a,t,g, or c
  SITE (597): n equals a,t,g, or c
  SITE (635): n equals a,t,g, or c
  SITE (658): n equals a,t,g, or c
  SITE (689): n equals a,t,g, or c
gccggatgctacattgatttttgagattgaactttatgctgtgaccaaaggaccacggagcattgagacatttaaacaaatagacatggacaatgacaggcagctctctaaagccgagataaacctctacttgcaaagggaatttgaaaaagatgagaagccacgtgacaagtcatatcaggatgcagttttagaagatatttttaagaagaatgaccatgatggtgatggcttcatttctcccaaggaatacaatgtataccaacacgatgaactatagcatatttgtatttctactttttttttttagctatttactgtactttatgtataaaacaaagtcacttttctccaagttgtatttgctatttttcccctatgagaagatattttgatctccccaatacattgattttggtataataaatgtgaggctgttttgcaaacttaacttgcaggaatggtatgactgtgtttcctactgctttattctgtaaacaagaattgtagcaccatgaaacagacctctgggtcccagtgggcattttttccccttttcaggatgtaggaggacatgtatagnatgtcaaaaactgnaaggctttttcccactttaaccccttacccagcatggntaaataacccaggttttttttanaggtttaaaaaggtttaaagggggccctcanaatttttggaaaaaaatcccctttaaggggccccc

SEQ ID NO: 117 - DNA, 605 bp, Homo sapiens
tcgacccacgcgtccgcccacgcgtccggcccgcgcgcccaggacgcctcctcccgctgctggcccggccggcggccctgactgcgctgctgctgctgctgctgggccatggcggcggcgggcgctggggcgcccgggcccaggaggcggcggcggcggcggcggacgggccccccgcggcagacggcgaggacggacaggacccgcacagcaagcacctgtacacggccgacatgttcacgcacgggatccagagcgccgcgcacttcgtcatgttcttcgcgccctggtgtggacactgccagcggctgcagccgacttggaatgacctgggagacaaatacaacagcatggaagatgccaaagtctatgtggctaaagtggactgcacggcccactccgacgtgtgctccgcccagggggtgcgaggataccccaccttaaagcttttcaagccaggccaagaagctktgaagtaccagggtcctcgggacttccagacactggaaaactggatgctgcagacactgaacgaggagccagtgacacagagccggaagtggaaccgcccagtgcccccccgagttcaagcaagggttgttttg

SEQ ID NO: 118 - DNA, 1856 bp, Homo sapiens
tcgacccacgcgtccgctctaagaaatgagatggagaagtacgagcggatccgagtggtggggagaggtgccttcgggattgtgcacctgtgcctgcgaaaggctgaccagaagctggtgatcatcaagcagattccagtggaacagatgaccaaggaagagcggcaggcagcccagaatgagtgccaggtcctcaagctgctcaaccaccccaatgtcattgagtactacgagaacttcctggaagacaaagcccttatgatcgccatggaatatgcaccaggcggcactctggctgagttcatccaaaagcgctgtaattccctgctggaggaggagaccatcctgcacttcttcgtgcagatcctgcttgcactgcatcatgtgcacacccacctcatcctgcaccgagacctcaagacccagaacatcctgcttgacaaacaccgcatggtcgtcaagatcggtgatttcggcatctccaagatccttagcagcaagagcaaggcctacacggtgcctgggcatggaagggacctccagggcactagaagtcttgagggccaggacctaaccctgcctcctcccctccccctaaaaaacccttggccctttggcccctgtttgggtggttctgcaggaggaagccccttggcttgctttgagaagaagctgtccccaaatgggcttatgcacagagcccctggtcttccctccctgcagggctgtgatcccagcttctatcctgcaggtggtgggtaccccatgctatatctcccctgagctgtgtgagggcaagccctacaaccagaagagtgacatctgggccctgggctgtgtcctctacgagctggccagcctcaagagggctttcgaggctgcggtgagtgtatgcaccctccaggggacaactgagaaatctactgcctcgcccagcagcccttggctcaagccacctcaggtttctcctctagctgagtcatgtctctcccttatcagattaccccaggggagggctatgggggtccctcagactatggatttctgagagtaggtcttgcctcccattagacggagggctcctgagggcagggctgtggctttcccagaagaccctcccaagagcaagacttgagttttcccagcatgctggggtttctgaggatatagctgcagctcccctatcagactagggatcactgaaagccaggttggactcccctgtcagtctgggagtctcctcatcagactgaagtctcctgagggcaaagctgttattgcttatttatttattttttttattatactttaagttttagggcacatgtacacaacgtgcaggtttgatacgtatgtatacatgtgcgatgttggtgtgctgcacccattaactcatcatttaacattaggtatatctcctaatgctatcccttccccctccccccaccccacaacaggccccggtgtgtgatgttccccttcctgtgtccatgtgttctcattgttcaattcccacctatgagtgagaacatgcggtgtttggttttttgtccttgcgatagtttgctgagaatgatggtttccagctccatccatgtcctacaaaggacatgaactcatcattttttacggctgcatagttttccatggtgtgtatgtgccacgttttcttaatccatctatcattgttggacatttaggttggttccaagtctttgctattgtgaatagtgccacaataaacatacgtgtgcatgtgtctttaaaaaaaaaaaaaaaaaaaaaaaaaaaaaaaaaaaaaaaaaaaaaaaaaaaaaaaaaaaaaaaaaaaaaaaaaaaaaaaaaaaaaaaaaaaa

SEQ ID NO: 119 - DNA, 1600 bp, Homo sapiens
tcgacccacgcgtccggcgacccagctccctggaggcccaggcacctcatgtctgccctcaacccagagtggagcagaccttccctggagcttctcaggagccacttcaaaagttcgtgccctcgtgaggctggcatgcaggatggcaggacagcccggccacatgccccatggagggagttccaacaacctctgccacaccctggggcctgtgcatcctcctgacccacagaggcatcccaacacgctgtcttttcgctgctcgctggcggacttccagatcgaaaagaagataggccgaggacagttcagcgaggtgtacaaggccacctgcctgctggacaggaagacagtggctctgaagaaggtgcagatctttgagatgatggacgccaaggcgaggcaggactgtgtcaaggagatcggcctcttgaagcaactgaaccacccaaatatcatcaagtatttggactcgtttatcgaagacaacgagctgaacattgtgctggagttggctgacgcaggggacctctcgcagatgatcaagtactttaagaagcagaagcggctcatcccggaaaggacagtatggaagtactttgtgcagctgtgcagcgccgtggaccacatgcattcacgccgggtgatggcaccgagacatcaagcctgccaacgtgttcatcacagccacgggcgtcgtgaagctcggtgaccttggtctgggccgcttcttcagctctgagaccaccgcagcccactccctagtggggacgccctactacatgtcaccggagaggatccatgagaacggctacaacttcaagtccgacatctggtccttgggctgtctgctgtacgagatggcagccctccagagccccttctatggagataagatgaatctcttctccctgtgccagaagatcgagcagtgtgactaccccccactccccggggagcactactccgagaagttacgagaactggtcagcatgtgcatctgccctgacccccaccagagacctgacatcggatacgtgcaccaggtggccaagcagatgcacatctggatgtccagcacctgagcgtggatgcaccgtgccttatcaaagccagcaccactttgccttacttgagtcgtcttctcttcgagtggccacctggtagcctagaacagctaagaccacagggttcagcaggttccccaaaaggctgcccagccttacagcagatgctgaaggcagagcagctgagggaggggcgctggccacatgtcactgatggtcagattccaaagtcctttctttatactgttgtggacaatctcagctgggtcaataagggcaggtggttcagcgagccacggcagccccctgtatctggattgtaatgtgaatctttagggtaattcctccagtgacctgtcaaggcttatgctaacaggagacttgcaggagaccgtgtgatttgtgtagtgagcctttgaaaatggttagtaccgggttcagtttagttcttggtatcttttcaatcaagctgtgtgcttaatttactctgttgtaaagggataaagtggaaatcattttttaaaaaaaaaaaa

SEQ ID NO: 120 - DNA, 1567 bp, Homo sapiens
ggcacgaggtttttgacttgttgtctgatatgcatggtactttgacttttgtcctgattcccagtcaacagatcaagccgcctcctgccaaggaaacagtaatccatgtaaaagctcattttgactatgacccctcagatgacccttatgttccatgtcgagagttaggtctgtcttttcaaaaaggtgatatacttcatgtgatcagtcaagaagatccaaactggtggcaggcctacagggaaggggacgaagataatcaacctctagccgggcttgttccaggtaagacacaatatggtagaaagtacataatattaaaagaacattgaaaatgcaagccttcacaaagaaaaactcactctttcatgcctctatttaataaagtattccagttactttttcgtgtagttgggtttttatgttgtacctgcagcgtaagtatattaaatagaatgtggccaattctttggcctttagaatggaattatgtataacttcagccaatcccatattgtagtacatttcctgtatacatattaagatgaccgtattatcgaggcaatacaacttgtattatactatatactatatactatgacattaattggagcatcaacatgatttttgagaaggaaagatgcataactttataaggagtcaggaaaagtaacatcatagaatttattgtaccaaacgtgatcttagggcagaaacaggatgctccaaattttttattgatgaaactatccctaacttagactaaactaaaactttagcttacattatagattaagattattaaggggacatgtttctgagagttaagatgatacaaaatagaacaaagtacagtcatgcatcacttaacgacagggataagttctgagaaatgtgccattaggtgatttcattgttgtgcaaacatcactgagtgtatttacacaaacctagatgatatagcctgctgtacagctaggctatgtggtatagcctattcctccaaccaccatcatatatatggttggttgttgactgaaatgttgttatgcagtgcatgactgtatgtagatataattattttctacaaatggctcttacagttcccaggatggcagtagaataaagaaaggagagcagaactaagggaagtttaataagctatcggagaaggcaaaggaatacatacaggatgataaaaatagggatatagagtaaagggataataattcatccatttatttgttaataaatgctgttatgtctgcaccatgtaaagcactttgcctggtgctgagataaacttcgcttacatactttacttgaaagcatatccattaacacttatgtatatttttttcttctgtgtcccctactttataatattttcatgatattgtctctgttataattctttctactgtatatgctcagtttataaacttcttgatgtcagaggccaagtcttatttgttttaaatccagataatatatgttaaattaatgaataaaagatgattttaaaagttctcagaaaacaaacaaaaattaaaaaaaaaaaaaaaaa

SEQ ID NO: 121 - DNA, 1549 bp, Homo sapiens
gtggaactcgggctgtcagctggtggccttgaacttccagacgccaggctacgagatggacctcaatgccgggcgcttcctagtcaatgggcagtgtggctacgtcctaaaacctgcctgcctgcggcaacctgactcgacctttgaccccgagtacccaggacctcccagaaccactctcagcatccaggtgctgactgcacagcagctgcccaagctgaatgccgagaagccacactccattgtggaccccctggtgcgcattgagatccatggggtgcccgcagactgtgcccggcaggagactgactacgtgctcaacaatggcttcaacccccgctgggggcagaccctgcagttccagctgcgggctccggagctggcactggtccggtttgtggtggaagattatgacgccacctcccccaatgactttgtgggccagtttacactgcctcttagcagcctaaagcaagggtaccgccacatacacctgctttccaaggacggggcctcactgtcaccagccacgctcttcatccaaatccgcatccagcgctcctgagggcccacctcactcgccttggggttctgcgagtgccagtccacatcccctgcagagccctctcctcctctggagtcaggtggtgggagtaccagccccccagcccacccacttggcccactcagcccattcaccaggcgctggtctcacctgggtgctgagggctgcctgggcccctcctgaagaacagaaaggtgttcatgtgacttcagtgagctccaaccctggggccctgagatggccccagctcctcttgtcctcagcccacccctcattgtgacttatgaggagcaagcctgttgctgccaggagacttggggagcaggacacttgtgggccctcagttcccctctgtcctcccgtgggccattccagcctccttcccccagaggagcgcagtcactccacttggccccgaccccgagcttagcccctaagccctcctttaccccaggccttcctggactcctccctccagctccggaacctgagctccccttcccttctcaaagcaagaagggagcgctgaggcatgaagccctggggaaactggcagtaggttttggtttttattttttgagacagggtctcgctccatcgcccaggctggagtgcaatgttgcaatcatggctcactgcagctttgaactcccaggctcaagcgatcctcccatctcagcctcctgagtagctgggactacaggcacaggccaccaaacctggctaatgtttaaattttatgtagagatggcggggggggcgggggtctccctatgttgcccaggctggtctcgagctcctgacctcaagtgatcctcctgccccagcattccaaagtgctgggattacaggtgtgagccactgcctggcctggccgtaggtttgtaactgtttcatagaagagccctggagaagacagtagaatgagcctatctagtttaaaaaataaagaagcacgttatttcaaaaaaaaaaaaaaaaaaa

SEQ ID NO: 122 - DNA, 1029 bp, Homo sapiens
cgccagctcgaaattaaccctcactaaagggaacaaaagctggagctccaccgcggtggcggccgctctagaactagtggatcccccgggctgcaggaattcggcacgaggttttattctcactgcttctgggcagagggagctgggaaggagccccggggccacctgacatggtccctgtccacagggctgggctgtgtcacgctgtccttcctgatcagcctgtactacaacaccatcgtggcgtgggtgctgtggtacctcctcaactccttccagcacccgctgccctggagctcctgcccaccggacctcaacagaacaggtgagctgggcgccgcctgctgtgtgggtccgtgcacggccgagagaggcatgtgctgcagcgtgtccagcatcagagcagctgcgggtggcggatgctcaccgcggggggagggccggggaaccggttgctctgtgtgcacatgcacgcgcctcggtctccccaggagcacacgtgcagtccagttcttatgacctccacgctgtgctgtgcttccctgccaggtccggaccaccgaggtccccttgcagccatgtgcatggcgtggtcatgcgagggcactgctgttgttagatttaagacgttaggtcggacgccgtggctcacgcttgtcaacccagcactttgggaggccgaggtgggcagatcacttgaggtcaggagttcaagaccagcctgaccaatatggtgaaaccccatctctactcaaaatacaaaaatcagccaggcatggtggcgggcatctgtaatcccagctagccaggaggctgagacagaagaattgcttgaacccgggaagtggaggttgcagatagccgagatcataccactgcactccagacggggtgacagagtgagactctgtatcaaaaaacaatcgaacaaacaaacaaaaaacagactttgggtccagacctcagccaggagctccatctggggagatcctcgagggggggcccggtacccaattcgccctatagtga

SEQ ID NO: 123 - DNA, 1218 bp, Homo sapiens
ggaaggatgagaagaccgcccagagagggagagccacgcaaaggcagacagcgccgtctcccaggagcagctgcgcaaactgcaggaacgggtggaacgctgtgccaaggaggccgagaagacaaaagctcagtatgagcagacgctggcagagctgcatcgctacactccacgctacatggaggacatggaacaggcctttgagacctgccaggccgccgagcgccagcggcttcttttcttcaaggatatgctgctcaccttacaccagcacctggacctttccagcagtgagaagttccatgaactccaccgtgacttgcaccagggcattgaggcagccagtgacgaagaggatctgcgctggtggcgcagcacccacgggccaggcatggccatgaactggccacagttcgaggagtggtccttggacacacagaggacaatcagccggaaagagaagggtggccggagccctgatgaggttaccctgaccagcattgtgcctacaagagatggcaccgcacccccaccccagtccccggggtccccaggcacggggcaggatgaggagtggtcagatgaagagagtccccggaaggctgccaccggggttcgggtgagggcactctatgactacgctggccaggaagctgatgagctgagcttccgagcaggggaggagctgctgaagatgagtgaggaggacgagcagggctggtgccaaggccagttgcagagtggccgcattggcctgtaccctgccaactacgtggagtgtgtgggcgcctgagtgtcctgacagcccttctgcaacgtttacccaccctggttcagagcccagcttctcctggagagccggaccctcagggccctgaaccgtcgctctctggctgctcctctgtcccttgagggaggaagtcctgggacccagggaggggaggggcctttgtctagggaagggactggtagggaagggacgagtctaggctgagggcaagatgggaggtcagaggtgacagaagcgttcaggggtgcctgggcctccccaggagctgtggactcagttcctgacctctgctttggggttcctggggtgggcttggggtgagtgtagttctggcctagcagcaccctcttgtggcttgttctagcgtgtattaaaacttgacacacacccacacacaaaaacaaaaacaccaaaaaaaaaaaaaaaaa

SEQ ID NO: 124 - DNA, 483 bp, Homo sapiens
  SITE (470): n equals a,t,g, or c
gggagcaccccttcctggtcaatctgtggtactccttccaggatgaggaggacatgttcatggtggtggacctgctcctgggaggcgacctgcgctaccatctgcagcagaatgtgcatttcacagaggggactgtgaaactctacatctgtgagctggcactggccctggagtatcttcagaggtaccacatcatccacagagacatcaagccagacaatatcctgctggatgaacacggacatgttcacattacagacttcaacatagcgacggtagtgaaaggagcagaaagggcttcctccatggctggcaccaagccctacatggctccagaagtattccaggtgtacatggacagaggccccggatactcgkaccctgtcgactggtggwccctgggcatcacagcctatgagctgctgcggcgctggaggccgtacgaaatccactcggtcacgcccatcgangaaatcctcaaca

SEQ ID NO: 125 - DNA, 2288 bp, Homo sapiens
aaagcaggaagtccatttttggcaacaatccgggcagaatgagcccaggggagacagcatcatttaacaaaacatctggaaaaagttcctgtgaaggcattcgacagacctgggaggaatcttcttcccctctcaacccaaccacgtccctcagtgctatcattagaactcccaaatgttatcatatctcgtcgctgaatgaatgccgccaaacgtctgtgtcgcaggtattctcagaaactgacccagcacaccgcctgtcagctgctgagaacttaccctgctgccacccgcatcgactcttccaacccgaaccccctcatgttctggctccatgggatacagcttgtggcactcaactaccagactgatgatctccctttacatttaaatgctgcaatgtttgaggcaaatggtggttgtggttatgtattgaaacctccagttctgtgggacaagaactgccccatgtatcagaagttttctccactagaaagagatctggacagcatggatcctgcagtctattctttaactattgtctctggtcagaatgtgtgccccagtaatagcatgggaagcccgtgcattgaagtcgacgtcctgggcatgcctctggacagctgccatttccgcacaaagcccatccatcgaaacaccctgaaccccatgtggaacgagcagtttctgttccacgttcacttcgaagatcttgtatttcttcgttttgcagttgtggaaaacaatagttcagcggtaactgctcagagaatcattccactgaaagctttaaaacgaggatatcgacatcttcagctgcgaaaccttcacaatgaagtcttggagatttctagtttattcattaacagcagaaggatggaagaaaattcctctggcaataccatgtcagcctcttcgatgtttaatacagaagaaagaaaatgtttgcagactcacagagtcacggtgcatggggtcccagggccagagccctttaccgttttcactattaatggaggcaccaaggcaaagcagcttctgcagcaaattctgacaaatgaacaagacatcaaacctgttaccacagactattttttgatggaagaaaaatattttatatctaaagaaaagaatgaatgtaggaaacaaccattccagagagccattggtccagaagaggagatcatgcaaattttaagcagctggtttccagaagagggatacatgggcaggattgtcttaaaaacccagcaggaaaacctagaagagaaaaacattgttcaagatgacaaagaggtgatcttgagctcagaggaggagagtttctttgtccaagtgcatgatgtttctccagagcaacctcgaacagtcatcaaagcaccccgcgtcagcactgcacaggatgtcattcagcagaccttatgcaaagccaaatattcctacagcatcctgagcaaccccaatccaagcgactatgtgcttttggaagaggtggtgaaagacactaccaacaagaagactaccacaccaaagtcctctcagcgggtccttctggatcaggagtgtgtgtttcaagcccaaagcaagtggaaaggtgcaggaaaattcatccttaagctaaaggagcaggtgcaggcatctcgagaagataaaaagaaaggcatttctttcgcaagtgaactcaagaagctcaccaagtcaactaaacagccccgaggacttacatcaccttctcagctcttgacctcagaaagtatccaaaccaaggaggagaaacctgtgggtggcttgtcctccagtgacacaatggattaccgacagtgactaagggcagcatgtttaacccaggtgaagatctttaagcaagaagttaaagagtgaacatggtggaaaaaatataattattttcatcagacttaaactggaaattgatgatttctgaactgaagccttcacacatgtgagatccatgctgaggagaagcaaaatggcacagggctagttgccaccaaccaatttactgatgaatgaagcccaggggactgccattttataaatgtcagcagttggaaaaatcgtcacgaattgacttagagcaagggtcagcaagcttgtctgtaaagggccaaacagtaaatattttagggctgggggccataaaatatgttgcaaccacccaattctgccattgtagtgcaaaagcagccatagacaacacatacatgaacgaacgtggctgtattccaaataaaactttatttatggacactgaaaaaaaaaaaaaaaaa

SEQ ID NO: 126 - DNA, 1361 bp, Homo sapiens
gccatgctgcaggccacatgtgggactcctatctatatggcccctgaagttatcagtgcccacgactatagccagcagtgtgacatttggagcataggcgtcgtaatgtacatgttattacgtggagaaccaccctttttggcaagctcagaagagaagctttttgagttaataagaaaaggagaactacattttgaaaatgcagtctggaattccataagtgactgtgctaaaagtgttttgaaacaacttatgaaagtagatcctgctcacagaatcacagctaaggaactactagataaccagtggttaacaggcaataaactttcttcggtgagaccaaccaatgtattagagatgatgaaggaatggaaaaataacccagaaagtgttgaggaaaacacaacagaagagaagaataagccgtccactgaagaaaagttgaaaagttaccaaccctggggaaatgtccctgatgccaattacacttcagatgaagaggaggaaaaacagtctactgcttatgaaaagcaatttcctgcaaccagtaaggacaactttgatatgtgcagttcaagtttcacatctagcaaactccttccagctgaaatcaagggagaaatggagaaaacccctgtgactccaagccaaggaacagcaaccaagtaccctgctaaatccggcgccctgtccagaaccaaaaagaaactctaaggttccctccagtgttggacagtacaaaaacaaagctgctcttgttagcactttgatgagggggtaggaggggaagaagacagccctatgctgagcttgtagccttttagctccacagagccccgccatgtgtttgcaccagcttaaaattgaagctgcttatctccaaagcagcataagctgcacrtggcattaaaggacagccaccagtaggcttggcagtgggctgcagtggaaatcaactcaagatgtacacgaaggttttttaggggggcagataccttcaatttaaggctgtgggcacacttgctcatttttacttcaaattcttatgtttaggcacagctatttataggggaaaacaagaggccaaatatagtaatggaggtgccaaataattatgtgcactttgcactagaagactttgttagaaaattactaataaacttgccatacgtattacagcagaagtgcttcagtcattcacatgtgttcgtgagattttaggttgctatagattgtttaagacagcttattttaaatgtagaaaaataggagattttgtaactgcttgccattaacttgctgctaaattcccaatgtattgattaaatcaataaaaaacagatgttactcagmaaaaaaaa

SEQ ID NO: 127 - DNA, 727 bp, Homo sapiens
  SITE (654): n equals a,t,g, or c
  SITE (688): n equals a,t,g, or c
  SITE (689): n equals a,t,g, or c
  SITE (696): n equals a,t,g, or c
ttttgtttaggcctgatactgaccagcagatgggcgctgtgtttgtagccccagaggtggtaggccggcagcggtatggacgccctgtggactgctgggccattggagtcatcatgtacatcctgctttcaggcaatccacctttctatgaggaggtggaagaagatgattatgagaaccatgataagaatctcttccgcaagatcctggctggtgactatgagtttgactctccatattgggatgatatttcgcaggcagccaaagacctggtcacaaggctgatggaggtggagcaagaccagcggatcactgcagaagaggccatctcccatgagtggatttctggcaatgctgcttctgataagaacatcaaggatggtgtctgtgcccagattgaaaagaactttgccagggccaagtggaagaaggctgtccgagtgaccaccctcatgaaacggctccgggcaccagagcagtccagcacggctgcagcccagtcggcctcagccacagacactgccacccccggggctgcaggtggggccacagctgcagctgcgagtggagctacctcagcccctgagggtgawgctgctcgtgctgcaaaagagtgataatktggccccccgcaraccgtagtkgcaccccagncacagaagggaagggccaccccaagccacttggnnggcaagnggcaacccccaaggcccaccggatggggaaa

SEQ ID NO: 128 - DNA, 709 bp, Homo sapiens
  SITE (554): n equals a,t,g, or c
  SITE (660): n equals a,t,g, or c
  SITE (665): n equals a,t,g, or c
  SITE (680): n equals a,t,g, or c
  SITE (696): n equals a,t,g, or c
  SITE (708): n equals a,t,g, or c
gtgtctctggcccccagccccagagctcttggagcagaaaccctacgggaaggccgtagatgtgtgggccctgggcgtcatctcctacatcctgctgtgtgggtacccccccttctacgacgagagcgaccctgagctcttcagccagatcctgagggccagctatgagtttgactctcctttctgggatgacatctcagaatcagccaaagacttcatccggcaccttctggagcgagacccccagaagaggttcacctgccaacaggccttgcggcacctttggatctctggggacacagccttcgacagggacatcttaggctctgtcagtgagcagatccggaagaactttgctcggacacactggaagcgagccttcaatgccacctcgttcctgcgccacatccggaagctggggcagatcccagagggcgagggggcctctgagcagggcatggcccgccacagccactcaggcctccgtgctggccagccccccaagtggtgatgcccaggcagatgcccgaggccaagtggactgacccccaganttccttcccttggatgctttcggtcccctccccccaaacccctcccccctggggcttggcctctgctggattttgaagaatttgagggtgtggccgcatgggcgcntgggnttgggaatgggggcncccccccaaagttctngttcccccaggnc

SEQ ID NO: 129 - DNA, 1100 bp, Homo sapiens
  SITE (1062): n equals a,t,g, or c
  SITE (1085): n equals a,t,g, or c
gctcaaattgctctggggtagaaggagatgttactgacgaagatgaaggagcagaaatgtctcagaggatgggaaaagagaacatggagcaacccaataatgtgcctgtgaagcgatttcagctttgtaaagaactgtctgaactggtcagcatctgcaaatcagttcagttcaaagaatttcaggtgtcgtttcaggttcagaagtactgggaagtctgttcctttaatgaagtgcttgccagcaagtacgccaatgaaaatccaggggactttgtaaattacaacaaacgttttcttgctagggtttttcccagtccaatgagaattgattccagtaacatgaatcctcaagatttttggaaatgtggttgccaaattgtagccatgaactttcagacaccaggactgatgatggacctgaatattggctggtttaggcagaacggaaactgtggctatgtcctccggccagccatcatgagggaggaggtctccttcttcagcgccaatacaaaagactctgtcccaggggtctcacctcaacttcttcacattaaaatcatcagtgggcagaactttcccaagcccaaaggatcaggtgccaaaggtgatgtggtagatccttatgtctatgttgaaatccatggaatccctgctgattgtgcagaacaaaggacaaaaacagtgcaccagaatggagacgctcccatttttgatgaaagctttgaatttcaaatcaacctgcctgaactggccatggtgcgctttgtagtgctggatgatgactacattggggatgaattcatcggccagtacacaattccctttgaatgtttacagacgggctaccgccatgtccccctgcagtccttaactggagaggtccttgcacatgcttctttatttgtccacgtggctattactaaccgaagaggaggaggrgaagccttcataaaagggggcctttcttgttgaggaaaaggggagaaatccaggggaatatgcatctttgagaacactggggattaaaaccggggatggagggtatttcaaggattgncccagcccccctattacgggggnttgcccacagatctt

SEQ ID NO: 130 - DNA, 784 bp, Homo sapiens
  SITE (682): n equals a,t,g, or c
  SITE (710): n equals a,t,g, or c
  SITE (732): n equals a,t,g, or c
  SITE (763): n equals a,t,g, or c
  SITE (765): n equals a,t,g, or c
tgggctgagcaggaacttgtgagattccagagccctgactacaggtgatcagcggtcagcaactccccaaagtggacaagaccaaagaggggtccattgtggatccactggtgaaagtgcagatctttggcgttcgtctagacacagcacggcaggagaccaactatgtggagaacaatggttttaatccatactgggggcagacactatgtttccgggtgctggtgcctgaacttgccatgctgcgttttgtggtaatggattatgactggaaatcccgaaatgactttattggtcagtacaccctgccttggacctgcatgcaacaaggtgagccagcccctttgacccctggccaataccccagctctggctgccttcctaatgctgtcctcctgccccttccaggttaccgccacattcacctgctgtccaaagatggcatcagcctcmgcccagcttccatctttgtgtatatctgcatccaggaaggcctggagggggatgagtcctgaggtgggcatttcacgggaagggttggtatgctggctttagacggggagaaacatctggaaggatgctcgagagaacaaatggaggtggtgaaaatcaagctttggattggcattcctaggcacaaaattacctcattcttctacaagcaatctgggacctgattttncaccttttttctcttttcttccctttcntttggtttcataagcccttggnaatctttcctggccttttccttttggggacncnatactgggagtccccttct

SEQ ID NO: 131 - DNA, 1369 bp, Homo sapiens
gcgagcgcggtggggccgcwtctgcatcagccgccgcagccgctgcggggccgcgaacaaagaggaggagccgaggcgcgagagcaaagtctgaaatggatgttacatgagtcattttaagggatgcacacaactatgaacatttctgaagattttttctcagtaaagtagataaagatggatgaatcagccttgttggatcttttggagtgtccggtgtgtctagagcgccttgatgcttctgcgaaggtcttgccttgccagcatacgttttgcaagcgatgtttgctggggatcgtaggttctcgaaatgaactcagatgtcccgagtgcaggactcttgttggctcgggtgtcgaggagcttcccagtaacatcttgctggtcagacttctggatggcatcaaacagaggccttggaaacctggtcctggtgggggaagtgggaccaactgcacaaatgcattaaggtctcagagcagcactgtggctaattgtagctcaaaagatctgcagagctcccagggcggacagcagcctcgggtgcaatcctggagccccccagtgaggggtatacctcagttaccatgtgccaaagcattatacaactatgaaggaaaagagcctggagaccttaaattcagcaaaggtgacatcatcattttgcgaagacaagtggatgaaaattggtaccatggggaagtcaatggaatccatggctttttccccaccaactttgtgcagattattaaaccgttacctcagcccccacctcagtgcaaagcaytttatgactttgaagtgaaagacaaggaagcagacaaagattgccttccatttgcaaaggatgatgttctgactgtgatccgaagagtggatgaaaactgggctgaaggaatgctggcagacaaaataggaatatttccaatttcatatgttgagtttaactcggctgctaagcagctgatagaatgggataagcctcctgtgccaggagttgatgctggagaatgttcctcggcagcagcccagagcagcactgccccaaagcactccgacaccaagaagaacaccaaaaagcggcactccttcacttccctcactatggccaacaagtcctcccaggcatcccagaaccgccactccatggagatcagcccccctgtcctcatcagtatcagtcgagccagtgcccctctggcctgtgcagcagctgctccactgacttccccaagcatcaccagtgcttctctggaggctgagcccagtggccggatagtgaccgttctccctggactccccwcatctcctgacagtgcytcrtcagcttgtgggaacagttcagcaaccamaccagacaaggatagaa

SEQ ID NO: 132 - DNA, 2785 bp, Homo sapiens
ggaagcgcccgcgcgggcgcaggcggccggratggcggggcccggctggggtcccccgcgcctggacggcttcatcctcaccgagcgcctgggcagcggcacgtacgccacggtgtacaaggcctacgccaagaaggacactcgtgaagtggtagccataaagtgtgtagccaagaaaagtctgaacaaggcatcggtggagaacctcctcacggagattgagatcctcaagggcattcgacatccccacattgtgcagctgaaagactttcagtgggacagtgacaatatctacctcatcatggagttttgcgcagggggcgacctgtctcgcttcatccatacccgcaggattctgcctgagaaggtggcgcgtgtcttcatgcagcaattagctagcgccctgcaattcctgcatgaacggaatatctctcacctggatctgaagccacagaacattctactgagctccttggagaagccccacctaaaactggcagactttggtttcgcacaacacatgtccccgtgggatgagaagcacgtgctccgtggctcccccctctacatggcccccgagatggtgtgccagcggcagtatgacgcccgcgtggacctctggtccatgggggtcatcctgtatggtgagacctcttttccctgcttctcaccctgaggcctacagtttcctcaggcaaggcctctctgggccacttctgaagggttctgatgaaaactgactgctggcccagggcccctgctgaggggcgtcaggccaggcttgacccattccctcccagcctccgctctgcctcccttccacagaagccctcttcgggcagcccccctttgcctccaggtcgttctcggagctggaagagaagatccgtagcaaccgggtcatcgagctccccttgcggcccctgctctcccgagactgccgggacctactgcagcggctcctggagcgggaccccagccgtcgcatctccttccaggacttytttgcgcacccctgggtggacctggagcacatgcccagtggggagagtctggggcgagcaaccgccctggtggtgcaggctgtgaagaaagaccaggagggggattcagcagcygccttatcactctactgcaaggctctggacttctttgtacctgccctgcactatgaagtggatgcccagcggaaggaggcaattaaggcaaaggtggggcagtacgtgtcccgggctgaggagctcaaggccatcgtctcctcttccaatcaggccctgctgaggcaggggacctctgcccgagacctgctcagagagatggcccgggacaagccacgcctcctagctgccctggaagtggcttcagctgccatggccaaggaggaggccgccggcggggagcaggatgccctggacctgtaccagcacagcctgggggagctactgctgttgctggcagcggagcccccgggccggaggcgggagctgcttcacactgaggttcagaacctcatggcccgagctgaatacttgaaggagcaggtcaagatgagggaatctcgctgggaagctgacaccctggacaaagagggactgtcggaatctgttcgtagctcttgcacccttcagtgaccctagaagaatgattggacagatgtgagccatctggagcagaggggcactaacccaggctgacgccaagaatgaagtggcccactgcagccctggcgagcaggcttcttggatggacagtgctgagacccccatatcccagagtccccagcctccctcaggttactctgcaccccacagatggtttgatggctgtgctgtatactggaggggagggcaggactctgggagaacagcacttctttcatgagacctttgttactcggtggttactgggtcctgtgcctgtccgttttggggcatgcagccctctatcatttttggctccgagaagagggcaaggggcccccgcagggtacttctgtgcttgccctcgccctgccagcaggcagctgtgcccctggcctgcccttcccgggaccccttattccaactcagctcctctttgcactggaatggggcactccaacacccctcagggaccaccctccccacagtatgcactcagccccacagaacccaccagtctttctgggaactcacacctgcccgccatcttggtactttaggttaatccctcaagcatgaaagctggatcttttggggtttaagaagcccaagccttgttcctgccctggcctagggagcactcaggagggttccttggtcctcatctctcccacctccgttccctctgggccccacactagccacagcgcgggccttgtgctggagtttgagcctgggacagggagagggaggcttggagacagtctgacccagtgccctctaggccacccacttctaggcctgccctgccgccgtggagccctgggcaagctctttcccctttctgggcctgggtctccccatctcttcaatggggctgataccttcacagcccacagcatgggcacttatgaggacaaagtgaatttaacctggaaaagaatgtatttgagagtttcttttaaataatcagcgggtgttggtgatttgtagcccttctgcccttaaatgcttccttgggcaagagctgtctgtcctccctgcaggaggctgagtgtgaagagtatcattcattgtttctctattaaattattttctctaaaaaaaaaaaaaaaaaaaaagggcgsccgctttaaaggatccaa

SEQ ID NO: 133 - DNA, 554 bp, Homo sapiens
  SITE (503): n equals a,t,g, or c
tgaaaactgactgctggcccagggyccctgctgaggggcgtcaggccaggcttgacccattccctcccagcctccgctctgcctcccttccacagaagccctcttcgggcagcccccctttgcctccaggtcgttctcggagctggaagagaagatccgtagcaaccgggtcatcgagctccccttgcggcccctgctctcccgagactgccgggacctactgcagcggctcctggagcgggaccccagccgtcgcatctccttccaggacttytttgcgcacccctgggtggacctggagcacatgcccagtggggagagtctggggcgagcaaccgccctggtggtgcaggctgtgaagaaagaccaggagggggattcagcagcygccttatcactctactgcaagctctggacttctttgtacctgccctgcactatgaagtggatgcccagcggaaggaggcaattaaggcaaagktggggcagtacgtgtcccgggntgaggagytcaaggccatcgtyttcctgtttcaatcaggccttgttgaggc

SEQ ID NO: 134 - DNA, 1268 bp, Homo sapiens
ccacgcgtccgcactgcctctgcccgaggacccagggaccctttcagcagagcgtcgttgcttgacacagcccgtggaggaccagggggtctccacccagctactcgcgccctctggcagcgtgtgcttctcctacaccggcacgccctggaagttgttcctacgcaaggaggtgttctacccacgggagaacttcagccatccctactacctgaggctcctctgtgagcagatcctacgggacaccttctccgagtcctgtatccggatttcccagaatgagcggcggaaaatgaaagacctgctgggaggcttggaggtggacctggattctctcaccaccaccgaagacagcgtcaagaagcgcatcgtggtggccgctcgggacaactgggccaattacttctcccgcttctttcctgtctcgggcgagagtggcagcgacgtgcagctgttagccgtgtcccaccgtgggctgcgactgctcaaggtgacccaaggccccggcctccgccccgaccagctgaagattctctgctcatacagctttgcggaggtgctgggtgtggagtgccggggcggctccaccctggagctgtcactgaagagcgagcagctggtgctgcacacagcccgggcaagggccatcgaggcgctggttgagctattcctgaatgagcttaagaaggactccggctatgtcatcgccctgcgcagctacatcactgacaactgcagcctcctcagcttccaccgtggggacctcatcaagctgctgccggtggccaccctggagccaggctggcagtttggctctgccgggggccgttccggactctttcctgccgacatagtgcagccggctgccgctcccgacttttccttctccaaggagcagaggagtggctggcacaagggtcagctgtccaacggggaaccagggctggctcggtgggacagggcctcagaggtgaggaagatgggagagggacaagcagaggcaaggcctgcctgagactgaggaaggaaaggggtttgaccactcccgaggctgccatgcggtgggaccaccctgctgtccgtctcctgtggctgcccctctgcccgctcctgatggctcgccttgtctctccagcaagactgtgcactccttgcaggcaggggctgggctggatgctgctcttgtgtcccacgtggtacttagttcaaggctgccccagcagatgcttaataaacagctcttcactttcaaaaaaaaaaaaaaaaaa

SEQ ID NO: 135 - DNA, 316 bp, Homo sapiens
agaagacgctkggcaaaggacagacagggctggttaaactcggggtccactgcatcacgggtcagaaggtcgccatcaagatcgtgaaccgggagaagctgtcggagtcggtgctgatgaaggtggagcgggagatcgccatcctgargctcatcgaacacccacatgtcctcaagctccacgrcgtctacgagaacaagaaatatttgtacctggttctggagcacgtctcggggggtgagctattcgactacctggtcctcccccacgaccttctgtacggatttcctctccggagaattcttgtttcgcgtaa

SEQ ID NO: 136 - DNA, 501 bp, Homo sapiens
  SITE (222): n equals a,t,g, or c
  SITE (225): n equals a,t,g, or c
  SITE (491): n equals a,t,g, or c
  SITE (498): n equals a,t,g, or c
  SITE (500): n equals a,t,g, or c
gccatagtggagtttgactaccaggcccagcacgatgatgagctgacgatmagcgtgggtgaaatcatcaccaacatcaggaaggaggatggaggctggtgggagggacagatcaacggcaggagaggtttgttccctgacaactttgtaagagaaataaagaaagagatgaagaaagaccctctcaccaacaaagctccagaaaagcccctgcacgaagtnmcnagtggaaactctttgctgtcttctgaaacgattttaagaaccaataagagaggcgagcgacggaggcsccggtgccaggtggcattcagctacctgccccagaatgacgatgaacttgagctgaaattggcgacatcatagaggtggtaggagaggtagaggaaggatggtgggaaggtgttctcaacgggaagactggatgtttccttccaacttcatcaaggastgtcaagggatccgatgagcttgctttcccagatgagcanttccaancna

SEQ ID NO: 137 - DNA, 1810 bp, Homo sapiens
ccacgcgtccgcgactccccaagtcccgaagaggataaggaggaacacatttcacttgcgcacagaggagtggacgcgtcaaagaaaacttccaagactgttaccatatcccaagtgtctgacaactttgtaagagaaataaagaaagagatgaagaaagaccctctcaccaacaaagctccagaaaagcccctgcacgaagtgcccagtggaaactctttgctgtcttctgaaacgattttaagaaccaataagagaggcgagcgacggaggcgccggtgccaggtggcattcagctacctgccccagaatgacgatgaacttgagctgaaagttggcgacatcatagaggtggtaggagaggtagaggaaggatggtgggaaggtgttctcaacgggaagactggaatgtttccttccaacttcatcaaggagctgtcaggggagtcggatgagcttggcatttcccaggatgagcagctatccaagtcaagtttaagggaaaccacaggctccgagagtgatgggggtgactcaagcagcaccaagtctgaaggtgccaacgggacagtggcaactgcagcaatccagcccaagaaagttaagggagtgggctttggagacattttcaaagacaagccaatcaaactaagaccatgaaggaccagcagaaacgagagattaaacagttattgtctgagttggatgaagagaagaaaatccggcttcggttgcagatggaagtgaacgacataaagaaagctctacaatcaaaatgaatacttgatcaatgaaatgtcacattattcatcctgagtccgagactcaaattttctgccccagccaaaataatcttgtgccaaaagattaaaggtttgcctcaaaatgtccctgtttgaaagattagcacaaaagtcttgatagcacaacacaaattccatccaagaggagaatcttccccagggtttagtcctggggctggcactcgttgtgacttacacagagcaaaattgtgctaaaggcttttctactctgagatctcaatgcgaaatgaaaactcaggcagtttagtccatagtggtactattttgatgatattttccattaataaaatgtaatttcagattattcgtttacaagctttataattttatgattttttaatcgtgttttgtcacagacttccctagtgtttgtactacacgtagtcagaagcgagtgtccttttcttttgcttcaggctaagagctgcctcgctctttgtccccccattaggattctattacatatgcaattgtaggttcaacctgtccctttccctgccagcaaaccccaccaccctaagagaaattttagcttatatatgacggtatatttacaaaaagagaaagagaaaatctggtatttgcaatgatctgtgccttctttttaccaccctcttgattggagcttttgtgatgcagctaccatgattcaaaaaaattaaaaattaaaaaaaaaaaatctgccacttatccaagtccactagaggccactgtcttcaaagcttctctcaccctagccaaaggtcctaagaggagacagctgtgaagttgggcgtgctctgtggtaccagctgtgacttttctatttctcctagttttaggttgttcatgaaactagaaatgtcatcctgcttgatttttcatcagccaagttaaacccctgctttctgtcctttgcaccttttgcgtgaacagaatatgcattattaaagcaaaaataaataaaagtaaaatgcaaatgaaaaaaaaaaaaaaaaaaaaaaaaa

SEQ ID NO: 138 - DNA, 723 bp, Homo sapiens
  SITE (565): n equals a,t,g, or c
  SITE (654): n equals a,t,g, or c
  SITE (723): n equals a,t,g, or c
gacgtgagtgtggcttgtatttctggtcctcccctgcttcactgctttcattttactcttatcgtgctttccagaaagtttgcctgctgggagagtctttttgatcgtttcccatgtgttgtcagatagctccatagaattcagtttctgagaaccagccagaagcatgcagtgacattgcacaatctgcctctgaagctggagatactagctgcagagctcaggggagctgctccacatcaccgacatgaagggaacaggcatcatggactgtgcgcccaaggcactcctggccagggcactttatgacaactgccctgactgctctgacgagctggctttcagcagaggggacatcctgaccattctggagcaacacgtrccagaaagcgagggttggtggaagtgtttgctccatgggaggcaaggcctggcccctgccaaccgsctycaaatcctcacggaggtcgctgcagacaggccgtgccccccattcctgagaggcctggaagaagctcctgccagctcagaggagacctatcaggtgcccactctaccccgcctncactccaggccccgtttatgagcagatgaggagttgggcggaggggccccagccccctactgcccaagtctatgaattccccgaccctnccaccagtgccagaaaatcatctgtgaaaagactctcaagcttttccaaaaacaggtaccggctcttcn

SEQ ID NO: 139 - DNA, 2211 bp, Homo sapiens
ccacgcgtccgtgaactaaccatccatcgcggagacattatccgagtgtttttcaaagataatgaagactggtggtatggcagcataggaaagggacaggaaggttattttccagctaatcatgtggctagtgaaacactgtatcaagaactgcctcctgagataaaggagcgatcccctcctttaagccctgaggaaaaaactaaaatagaaaaatctccagctcctcaaaaggtaaaataaaacaaaacagctcacagagacacctccttcttccccctgcttctgcctccatgagtaactacctatatgacgtgctgctgctgagaccaaggaatgagtgagtaaaggtgtttggaagtcaaatattggtcctagttaagtaagtgtccttttcaagtaagtggtaaactttgtaatgtggacccccttctaacttaggattcatataatttgaacacaggctaagctgcctctgcatcattaaaaaggatttgggtatgccagtgataggaatacacagtagaaaagatggcagggaccatgtttaacatacctaagacaaactttctgaggatatcacagcatccatttcacatgaacagacttagcagaattggcaagacctgcacatggcaacatattattcatttttcaggataacaaaaaataattaaaagtaacattggcttaacactggtatatagttcagtatgacttcttttccttcaacctctggaataggttcaaattgatgagaatttctgattagagcccttaatgttgagttttttgaaaagttttatcaagtttcatatatacctatattgatggtaagttgctggtcttgccatgggcaaagagagaaaaatgatactgagaccttgtaaagaatagctggacatggaggcgcacacctgtaatcccagcaactcaaaaggctgaggcgggaggattgcttgagcccaggagttcaaggctgcagtgagctacgatcatgccactgtactccagcctgagcaacaaagcatgacccaatctcttaaaaaaaaaaagaaaagaataaaacatttcacatttaatttgactgctgtgtttagaatttatttcacaagtctggaaagaaacaggataatttctgttatgatggtgctttctgaggttttgatgattttctttgcttattgttctattggatgagggcagtctgaattagtagttgaatctgaaatttcccgtgtgtatgtacttttttcccaaacacgttttaactgagtcagagcaattccactggtggagaaaaattaagatgtcatgggttcttttgttgttctaccaaatgggtcacctgttgcaacactcacctttcaccaaaaagtctccttgctctttaattcttgtttttattatgcttgacttaaagctctacagctagcagtaataatcatataattatggtccagaaaagcataatatcctcttgaaatctgtaagaaaagtaatgcttgtttaaagatagtgccaaatcttgctgaagaatgatcttgcagaaatctgattgtgaagaaggaaatctaaaaaggccaaacaagcttcagtagagataacaccaggaaagcagttactcaaacaagactgaaagagaagcaatcaatcaataagaacaagtcccaggacttcagactaggctcagaatctatgacacattctgaaatgagaaaagaacagagccatgaggaccaaggacacataatggatacacggatgaggaagaacaagcaagcaggcagaaaagtcactctaatagagtaaagaattgaagaaaagttaagagctgccgaaatgcacagaggtgaaaatgacaaaccaaatggaatttctcttcagagttcagaattttcagatactaaggaggaagaaaggatccactacttcttgttcttatgaatgactctagaaaaatcagaatcaagttgtgggtggaaaaatcaacgtggcctttgagttcagttgttataaaccattgtgactattgttggtcaaagtattggtacttatattgttagtaattgcatcataattacattaccagtgttggaaaactaatgaagaaaacactgtaattgctactcagcaaatgtgaataaaaggtgtttgcgttataaaaaaaaaaaaaaaaaaaaaaaaaaaaaaaaaaaaaaaaaaaaaaaa

SEQ ID NO: 140 - DNA, 603 bp, Homo sapiens
  SITE (296): n equals a,t,g, or c
  SITE (583): n equals a,t,g, or c
  SITE (595): n equals a,t,g, or c
agagccgaggcccacctacttcatctcctccaccgtgggcaaacgctgccccgaggcggccgacgctggcgacacccgcaagtggactttagtgggccatgagctgctcaacacggaggcgcctctcaagctggtgaacccgctgaagcacggcatcgtggtggactgggactgcgtgcaggacatctgggagtacatcttccgcaccgccatgaagatcctccccgaggagcacgctgtgctggtctccgaccctccgctcagccccagcagcaaccgggagaagtacgcggasntcatgtttgagaccttcggcatcccasccatgcacgtgacgtcccagtcgttgctgtccatctaytcctacggcaagacctcggggctggtggtggagagcgggcacggcgtctcgcacgtggtgcccatatccgagggcgacgtgctgccgggcctgaccagccgcgccgactaacgctgggggtgacctyaccaactgacctgatgcagctgctcaatggaaggcggggccacgcatttcacggacgaccacctggcacatcatagagcacatccaaggaagaantggtggctatgnggcctttc

SEQ ID NO: 141 - DNA, 1404 bp, Homo sapiens
ggcacgagctgaggatgcagggctcccgggcacggtgctagccctgccttgagacaccccgagagctgtgggaagagctgtgggatcccctattgcatcacaaagcggccctggagggctggtctttattttgatgaggctgagaagggaaggctgcgggcatgtttaatccgcacgctttagactccccggctgtgatttttgacaatggctcggggttctgcaaagcgggcctgtctggggagtttggaccccggcacatggtcagctccatcgtggggcacctgaaattccaggctccctcagcagaggccaaccagaagaagtactttgtgggggaggaggccctgtacaagcaggaggccctgcagctgcactcccctttcgagcgtggcctgatcacagggtgggatgacgtggagagactctggaagcacctctttgagtgggagctaggcgtgaaacccagcgaccagcccctgcttgcaacggagccctccctgaaccccagggagaaccgtgagaagatggcagaagtcatgttcgagaacttcggcgtgcccgctttctacctgtcggaccaggcggtgctggctctctacgcctctgcctgtgtcacgggcctggtggtggacagcggggatgcggtcacctgcactgtccccatctttgagggttactccctgccccacgcagtcaccaagctccacgtggcgggcagggacatcacggagctcctcatgcagctgctcctggccagcggccacaccttcccctgccagctggacaagggtctcgtggacgacatcaaaaagaagctgtgctacgtggccttggagcccgagaaggagctttcccggaggccggaggaggtcctgagggagtacaagctgcccgacgggaacatcatcagcctcggggacccgctgaccaggcgcccgaggccctgttcgtgccccagcagctgggcagccagagccccgggctctcgaatatgggctccagcagcatcaccaagtgtgataccgacatccagaagatcctctttggggagattgtgctgtcggggggcactaccctgttccacgggctggatgaccggcttctcaaggagctggagcagctggcctccaaggacacccccatcaagatcacggctccccccgaccggtggttctccacctggattggagcctccatcgtcacctctctgagtagcttcaagcagatgtgggtcaccgccgcagacttcaaggagtttgggacctccgtggtgcagagaagatgcttctgaaggccgcttctcgttgggtaccgtggggggtgaaccctagccccagctttgggaggatgttcaataaaggaccaatgccggaaaaaaaaaaaaaaaaaaaaaaaaaaaaa

SEQ ID NO: 142 - DNA, 1162 bp, Homo sapiens
  SITE (100): n equals a,t,g, or c
  SITE (1158): n equals a,t,g, or c
  SITE (1159): n equals a,t,g, or c
  SITE (1160): n equals a,t,g, or c
  SITE (1162): n equals a,t,g, or c
agtggttattgacatgggcacaggcacctgtaagtaggttttsctgggcaggccagccscacctacaccgtggccaccatcctgggctgccagcccaagnaaacccgmcacctcggggcagtccgggctgcagacgttcatcggcgaggcagcccgmgtgctcccagagctgacgctggtgcaacccctgcgcagcggcatcgtcgtggactgggatgccgccgagctcatctggcgccacctgctggagcacgacctccgagtggccacccacgaccacccgctgctgttctccgacccacccttcagcccggccaccaaccgcgagaagctagtggaggtggccttcgagtcgctgcgctccccagccatgtacgtggcatcgcagtcggtgctgtctgtctacgcccacggtcgtgtcagcgggctggtggtggacacgggacacggggtcacctacacagtgcccgtcttccagggctacaacctgctccacgccacggagcgtctggacctggcgggcaaccacctgaccgccttcctggcggagatgctgctccaggccggcctgcccctgggacagcaggacctggacctagtggagaacattaagcaccactattgctacgtggccttcgacttccagaaggagcaggcccggccggagcaggagtacaagcggactctgaagctgcccgatgggcgcacggtcaccctgggcaaggagctgttccagtgtccggagctgctgttcaaccccccagaggtcccggggctgtcacccgtcggcctctccaccatggccaagcagagtctccgcaagttgtcactggagatgcgcgcggacttggcccaaaacgtgcttctctgcggtgggtcctcgctcttcaccggcttcgagggtcgcttccgggcagagctgctgcgcgctctgccagccgagacccacgtggtggtggctgcccagcccaccaggaatttctccgtatggatcgggggctccatcctggcctccctgcgcgccttccagtcctgctgggtcctgcgggagcagtacgaggaacagggtccctatatcgtgtaccgcaaatgctactgaccagggcagagctggggagggcgtgggggcagtaaagcctctgctacaaaaaaaaaaannnan

SEQ ID NO: 143 - DNA, 1658 bp, Homo sapiens
ggcacgagccactgccagctaccggtggtgatcgacaacggctcgggaatgatcaaggcgggcgtggctgggtgccgggagccccagtttatctacccgaacattatcggccgcgccaagggccagagccgcgcggcccagggcgggctagaactctgcgtgggcgaccaagctcaggactggaggagctcgctgttcatcagttacccagtggagcgtggtctcattacttcatgggaggacatggagatcatgtggaagcatatctatgactataacctaaagctgaagccgtgtgatggcccagtcttgattactgagccagcgctgaacccactggccaaccggcaacagatcacggaaatgttttttgagcatctgggtgttcctgccttctatatgtccatccaggctgtgctggctctctttgctgctggcttcactactggccttgtgctgaattcaggtgctggggttacccagagtgtgcccatctttgagggttactgtctgcctcatggtgtgcagcaactggatctggcaggccttgacctcaccaactacctcatggtgctaatgaagaaccatggtatcatgttgctcagtgcttcagacagaaagattgttgaagacatcaaggagagcttttgytatgtggcaatgaactacgaagaggaaatggccaakaaacccgattgtctagagaaagtttaccaactacctgatgggaaggtcatccagctccatgaccagctcttttcttgtccagaggccctcttctctccgtgtcatatgaaccttgaggcccctggcattgataagatatgcttcagcagcataatgaaatgtgatacaggcctgaggaattccttcttttccaatattatccttgccgggggatcaacctctttccctggtttagacaagcggttagttaaggatatagcaaaggtggctcctgccaacaccgctgtgcaagttatagctcctccagaaaggaaaatatcagtgtggatgggaggttctattcttgcatccttgtctgccttccaggacatgtggatcactgctgcagaatttaaagaagttggacccaacatagtacaccaaagatgcttctgaaatacagataaaatggttggaagaaaatgttttgagtatatgtgacagaaaactttggatattatatgtttctgggagaagagaaaatacttcacctattgggatgccaatatttctgttgtatttctataatgggtttgggggataataatggtgaagctcaagaacagatgtctattgagtagaaccaagttaaaataatgtttcccatagtgtttcttctataacttgacgttggtgagcttatatttcccttggaagagagcatttgtggtmcaatatgctatgtgccaaatgagtgataagatttaagcttattgaagtttagggaaaraaggttgctgtggtgaggaacgagactccatagcaraggtatgccatcatggaaggggtggcattgggatggagcgcagatatccaggcaagcatactaaaatgaacaagttgctaaaratgagaatgaacaaagcatattcagggcatgtttaatagactgattttgtttttaaaaaaaaaaaaaaaaaaaaaaaaaaaaa

SEQ ID NO: 144 - DNA, 1497 bp, Homo sapiens
gcttgaatccagtgggattgagaactttctaagagtggtgcggctcttgacaacatgtgggctccaccagcagcaatcatgggggatgggcccaccaagaaggtgggcaaccaggcccccctgcagacacaggccctccagactgcctctttaagggatggcccggcgaagcgggccgtgtgggtccgccatacgagttcagagccacaagaacctactgaatcaaaggcagccaaggagaggcccaagcaggaggtgaccaaagcagtggtcgtggacctgggcactggctactgtaaatgtggctttgccggcctgccaagacccacccacaagatctcaacaacggtgggcaagccctacatggagaccgccaagactggggataatcgcaaggagacattcgtggggcaggaactcaacaacacaaacgttcatctcaagctggttaaccctctgcgacatggcatcatcgtggactgggatacagtgcaggatatctgggaatatctcttccgacaagagatgaagatcgccccggaggagcatgcggtcttggtttcagacccgccactgagcccacacaccaacagagagaaatatgctgaaatgctgtttgaagccttcaacacccctgcaatgcacatcgcctaccagtcgcgcctgtccatgtactcctatggaaggacctccggcctggtggtggaggtgggccatggcgtgtcctacgtggtccccatctacgagggttatcctttgcccagcatcaccggaaggctggactacgcgggctctgacctgacagcctacctgctgggcctgctgaacagtgcggggaacgaattcacccaggaccagatgggcatcgtggaggacatcaagaagaaatgctgctttgtggccctggatcccattgaggagaagaaagtccctctcagtgagcatacgatccgctacgtgctgccggatgggaaggagattcagctgtgccaggaacggttcctctgctcggagatgttcttcaagccatctctcatcaagtccatgcagctgggcctycacacccaaaccgtgtcctgccttaacaagtgtgacatcgccctcaaacgggacctcatggggaacatcctgctctgcgggggcagcacgatgctcagtggcttccctaaccgtctgcagaaggagctaagcagcatgtgtcccaatgacaccccgcaggtaaacgtgctgcctgaaagagacagtgccgtgtggaccggtggctccatcctggcctcacttcagggtttccaaccattgtgggtccaccgctttgagtacsaggaacacgggcctttcttcctctacagaaggtgcttctgaacggcgacgaggatggacactgcactggcagtgcctaccctcgacagggtgagcgcactcctacacacagggggtggagccggcgcttattcctgtagcattaaacacccctcatatgcccctcaaaaaaaaaaa

SEQ ID NO: 145 - DNA, 587 bp, Homo sapiens
  SITE (575): n equals a,t,g, or c
  SITE (586): n equals a,t,g, or c
gccagagcggagactgaagcctgaactaggggccgggcctcaggcctaggaactagccacgagctgaaaaggaggcggatggcccggacagaagaggcggggctttcagaccagagggcggagccaagagctgaaaagggtggtgatttggtccagaagaggaagaacttaggctccggaggcagagccaaaggctgaaggggactactccctaggacagaggccgggaggtatcgggccgactaagccgagtggcgcggaggagcggagccttcagccccgcggctgggccgagcccgaaggtggcgtcggtgtcggggagccgccgcgtgcaccggccgtcctccctgggccgcatcgcggtggtggtggaccagggctcgggcttcaccaaggcgggcttcgcgggcgagaaccagccgcgcatagtgctgaagagctytagcctggtgcccagctgggaccggccggtgctgcccggagcgccgggctgcgagctggcgggcgcgtggcgcggscgcaccccatcaagcacggcgtggtggcggactgggaggcgctggaagggctgtggnagcgcctgctng

SEQ ID NO: 146 - DNA, 318 bp, Homo sapiens
gtccaggagaaaaaatccttttgtttaaacgtgcgcttggtgtractaccggcattctgccgtggaacttcccgttcttcctcattgcccgcaaaatggctcccgctcttttgaccggtaataccatcgtcattaaacctagtgaatttacgccaaacaatgcgattgcattcgccaaaatcgtcgatgaaataggccttccgcgcggcgtgtttaaccttgtactggggcgtggtgaaaccgttgggcaagaactggcgggtaacccaaaggttcgcaatggtcagtatgacaggcagcgttctctgcaggtgagaa

SEQ ID NO: 147 - DNA, 656 bp, Homo sapiens
  SITE (320): n equals a,t,g, or c
aattccgattgcaccacagcactctggcctgggsaacaagagcaagactccatcccccacaacccccccaaaaaataacagacaaaagagaagcagttggagccacgagggtacctttctcctgagagagatccaagtgmgacagaagaagactagagaagagaaccaaagatttatccagtgagaaatacttaccattctgggagggaggagaaagagggccctggaggacttagagagggtccctagagagacakggtaagaacctggacatttctgtgcagaaggagatggttttgaggcagtgggtgaggggtccntgcatytkagaagktccgagtggggtgaattttgtgtggacttcatcttcgacgacacttgtttcattgcgaaggccactgtttgcttcctccctgcatttgccaagacatctaacatatcctgatattgctttttcaggtcagaatgaaggaacgatttccgtagttgaaggagaaacattgtatgtcatagaggaagacaaaggcgatggctggacccgcattcggagaaatgaagatgaagagggttatgtccccacttcatatgtcgaagtctgtttggacaaaaatgccaaaggtgctaagacttatatttaataccataaaaaaaaaaaa

SEQ ID NO: 148 - DNA, 2702 bp, Homo sapiens
gggtcgacccacgcgtccggcggcactcattcactgcacttggtccgagacagaaaacgtttgagttgttccacacacaccccctctaaatgtcgagaagccccaggttgcatgatggaatttgaacattacttcaagaggttttgtattttggattagttaattgggtttgtcctctgctgactgtttcttcggatgcattttttggtgtgctcttgagggattaaatgcaaagagatcacaccatggactacaaggaaagctgcccaagtgtaagcattcccagctccgatgaacacagagagaaaaagaagaggtttactgtttataaagttctggtttcagtgggaagaagtgaatggtttgtcttcaggagatatgcagagtttgataaactttataacactttaaaaaaacagtttcctgctatggccctgaagattcctgccaagagaatatttggtgataattttgatccagattttattaaacaaagacgagcaggactaaacgaattcattcagaacctagttaggtatccagaactttataaccatccagatgtcagagcattccttcaaatggacagtccaaaacaccagtcagatccatctgaagatgaggatgaaagaagttctcagaagctacactctacctcacagaacatcaacctgggaccgtctggaaatcctcatgccaaaccaactgactttgatttcttaaaagttattggaaaaggcagctttggcaaggttcttcttgcaaaacggaaactggatggaaaattttatgctgtcaaagtgttacagaaaaaaatagttctcaacagaaaagagcaaaaacatattatggctgaacgtaatgtgctcttgaaaaatgtgaaacatccgtttttggttggattgcattattccttccaaacaactgaaaagctttattttgttctggattttgttaatggaggggagctttttttccacttacaaagagaacggtcctttcctgagcacagagctaggttttacgctgctgaaattgctagtgcattgggttacttacattccatcaaaatagtatacagagacttgaaaccagaaaatattcttttggattcagtaggacatgttgtcttaacagattttgggctttgtaaagaaggaattgctatttctgacaccactaccacattttgtgggacaccagagtatcttgcacctgaagtaattagaaaacagccctatgacaatactgtagattggtggtgccttggggctgttctgtatgaaatgctgtatggattgcctcctttttattgccgagatgttgctgaaatgtatgacaatatccttcacaaacccctaagtttgaggccaggagtgagtcttacagcctggtccattctggaagaactcctagaaaaagacaggcaaaatcgacttggtgccaaggaagactttcttgaaattcagaatcatcctttttttgaatcactcagctgggctgaccttgtacaaaagaagattccaccaccatttaatcctaatgtggctggaccagatgatatcagaaactttgacacagcatttacagaagaaacagttccatattctgtgtgtgtatcttctgactattctatagtgaatgccagtgtattggaggcagatgatgcattcgttggtttctcttatgcacctccttcagaagacttatttttgtgagcagtttgccattcagaaaccattgagcaaaataagtctatagatgggactgaaacttctatttgtgtgaatatattcaaatatgtataactagtgcctcatttttatatgtaatgatgaaaactatgaaaaaatgtattttcttctatgtgcaagaaaaatagggcatttcaaagagctgttttgattaaaatttatattcttgtttaataagcttatttttaaacaatttaaaagctattattcttagcattaacctatttttaaagaaaccttttttgctattgactgtttttttccctctaagtttacactaacatctacccaagatagactgttttttaacagtcaatttcagttcagctaacatatattaatacctttgtaactctttgctatggcttttgttatcacaccaaaactatgcaattggtacatgggttgtttaagaagaaaccgtatttttccatgataaatcactgtttgaaatatttggttcatggtatgatcgaaatgtaaaagcataattaacacattggctgctagttaacaattggaataactttattctgcagatcatttaagaagtaacaggccgggcgcggtggctcacgcctgtaatcccagcactttgggaggctgaggcgggcagatcacctgaggtcaggagttggagaccagcctgaccaacatggacaaaccccgtctctactaaaaatacaaaattggcagggtgtggtggcacatgcctataatcccagctacttgggaggctaaggcaggagaatcgcttgaacccgggaggcggaggttgcagtgagccgagatcgcaccattgcactcctgcctgggcaacaagagtgaaactccatctccgaaaaaaaaaaaaaaaaaaaaaaaaaaaaaaaaaaaaaaaaaaaaaaaaaaaaaaaaaaaaaaaaaaaaaaaaaaaaaaaaaaaaaaaaaaaaaaaaaaaaaaaaaaa

SEQ ID NO: 149 - DNA, 1851 bp, Homo sapiens
  SITE (1786): n equals a,t,g, or c
gagatgacactttaatagttctggctgaagagcatggttgtttggacattataaaggagcttcctgaaactgtgatagatcttttgaataagtgccttaccttccatccttctaagaggccaaccccagatgaattaatgaaggacaaagtattcagtgaggtatcacctttatataccccctttaccaaacctgccagtctgttttcatcttctctgagatgtgctgatttaactctgcctgaggatatcagtcagttgtgtaaagatataaataatgattacctggcagaaagatctattgaagaagtgtattacctttggtgtttggctggaggtgacttggagaaagagcttgtcaacaaggaaatcattcgatccaaaccacctatctgcacactccccaattttctctttgaggatggtgaaagctttggacaaggtcgagatagaagctcgcttttagatgataccactgtgacattgtcgttatgccagctaagaaatagattgaaagatgttggtggagaagcattttacccattacttgaagatgaccagtctaatttacctcattcaaacagcaataatgagttgtctgcagctgccacgctccctttaatcatcagagagaaggatacagagtaccaactaaatagaattattctcttcgacaggctgctaaaggcttatccatataaaaaaaaccaaatctggaaagaagcaagagttgacattcctcctcttatragaggtttaacctgggctgctcttctgggagttgagggagctattcatgccaagtacgatgcaattgataaagacactccaattcctacagatagacaaattgaagtggatattcctcgctgtcatcagtacgatgaactgktatcatcaccagaaggtcatgcaaaatttaggcgtgtattaaaagcctgggtagtgtctcatcctgatcttgtgtattggcaaggtcttgactcactttgtgctccattcctatatctaaacttcaataatgaagccttggcttatgcatgtatgtctgcttttattcccaaatacctgtataacttcttcttaaaagacaactcacatgtaatacaagagtatctgactgtcttctctcagatgattgcatttcatgatccagagctgagtaatcatctcaatgagattggtttcattccagatctctatgccatcccttggtttcttaccatgtttactcatgtatttccactacacaaaattttccacctctgggataccttactacttgggaattcctctttcccattctgtattggagtaggcaattcttcagcagctgcgggaccggcttttggctaatggctttaakgagtgtattcttctcttctccgatttaccagaaattgacattgaacgctgtgtgagagaatctatcaacctgttttgttggactcctaaaagtgctacttacagacagcatgctcaacctccaaagccatcttctgacagcagtggaggcagaagttcggcaccttatttctctgctgagtgtccagatcctccaaagacagatctgtcaagagaatccatcccattaaatgacctgaagtcagaagtatcaccacggatttcagcagaggacctgattgacttgtgtgagctcacagtgacaggccacttcaaaacacccagcaagaaaacaaagtccagtaaaccaaagctcctggtggttgacatccggaatagtgaagactttattcgtggtcacatttcaggaagcatcaacattnccattcagtgctgccttcaytgcagaaggggagcttacccagggcccttacactgctatgctcca

SEQ ID NO: 150 - DNA, 1303 bp, Homo sapiens
  SITE (1273): n equals a,t,g, or c
  SITE (1275): n equals a,t,g, or c
  SITE (1283): n equals a,t,g, or c
tttcagtggccatgccatatattgttccattgtgactgcttgtgcttcattttgctctttcaggagctgtacatttgcacaccataacatttctcagtattcttactcagtattcaggacaatgctcccatgacagatatgcggagtgggtgagaattctaaagacaaagggagaattgccactaccttacactatcaacttccactcaaccttcttttctctagttccaatgatctcaactcctttagctactccataaatggtgacatgctggatcagcaaatataaatgtttacactaagttattattatcccaaatgatatttgtaattggcactcataaaaaaatmaattagtaatatttattttgataaatcaccttccacactcagattgatgaagcatttgttattgtttaaaaaagaagccttcattacactgctactcgttttcgagtggttcgttctgcmccctcttaagatctttacatgccaaaccttgggtaattaagtcattttcattttgtcagcttaattaattcgaaggtgacctgagttttattgtagaaaataaacaacaatccattctaatgttaaaatgttttaagaatagtttttaaataaatagtaatttatcattctgtaaggctagacatactaaatttggtttaaagtgttacgatcatctttaaaaacaaagtgtcttaaaatagttatgtcacaaggtattaaatatcacatataggaatcctaagataagatgtgaaattaacaagaacaagcaatttctaaaattgttctttcaatcagaaattatctttagaacatttaattttcatctatcaccatcattgttatatagtccttgtaattaattgaatttgattctggatcaattgcagcagacaacatttcttccatttcctcttgagaaaaaggctcaccttcttcagtcatatacttgatcagctcgtccttagtaagaaacccacgtttagctgaatctaaaacctcaaaagctcgaagaaggacatcttctggaattggtctgtattttctttctagtagtatttctgtcatcaccggaagaaatttttcgaatcgaatgtatccagtaggttcttcttctctacctctgcaatcagatcatgcagctctccttccgtaggacagcatsctaatgacctgataattggtccaatctctctctcctctcaagcatcttcattattttctttattagctggttcctcttttgccttaaaatattcangnatcttccntatcttgaaaaaacttgata

SEQ ID NO: 151 - DNA, 2225 bp, Homo sapiens
gcggacgcgtgggcggttgcgctgcggagcgcagctgtgagggagtcgctgtgatccggggccccggaacccgagctggagctgaagcgcaggctgcggggcgcggagtcgggagtgcaggcctgagtgttccttccagcatgtcggagggggagtcccagacagtacttagcagtggctcagacccaaaggtagaatcctcatcttcagctcctggcctgacatcagtgtcacctcctgtgacctccacaacctcagctgcttccccagaggaagaagaagaaagtgaagatgagtctgagattttggaagagtcgccctgtgggcgctggcagaagaggcgagaagaggtgaatcaacggaatgtaccaggtattgacagtgcatacctggccatggatacagaggaaggtgtagaggttgtgtggaatgaggtacagttctctgaacgcaagaactacaagctgcaggaggaaaaggttcgtgctgtgtttgataatctgattcaattggagcatcttaacattgttaagtttcacaaatattgggctgacattaaagagaacaaggccagggtcatttttatcacagaatacatgtcatctgggagtctgaagcaatttctgaagaagaccaaaaagaaccacaagacgatgaatgaaaaggcatggaagcgttggtgcacacaaatcctctctgccctaagctacctgcactcctgtgacccccccatcatccatgggaacctgacctgtgacaccatcttcatccagcacaacggactcatcaagattggctctgtggctcctgacactatcaacaatcatgtgaagacttgtcgagaagagcagaagaatctacacttctttgcaccagagtatggagaagtcactaatgtgacaacagcagtggacatctactcctttggcatgtgtgcactggagatggcagtgctggagattcagggcaatggagagtcctcatatgtgccacaggaagccatcagcagtgccatccagcttctagaagacccattacagagggagttcattcaaaagtgcctgcagtctgagcctgctcgcagaccaacagccagagaacttctgttccacccagcattgtttgaagtgccctcgctcaaactccttgcggcccactgcattgtgggacaccaacacatgatcccagagaacgctctagaggagatcaccaaaaacatggatactagtgccgtactggctgaaatccctgcaggaccaggaagagaaccagttcagactttgtactctcagtcaccagctctggaattagataaattccttgaagatgtcaggaatgggatctatcctctgacagcctttgggctgcctcggccccagcagccacagcaggaggaggtgacatcacctgtcgtgcccccctctgtcaagactccgacacctgaaccagctgaggtggagactcgcaaggtggtgctgatgcagtgcaacattgagtcggtggaggagggagtcaaacaccacctgacacttctgctgaagttggaggacaaactgaaccggcacctgagctgtgacctgatgccaaatgagaatatccccgagttggcggctgagctggtgcagctgggcttcattagtgaggctgaccagagccggttgacttctctgctagaagagaccttgaacaagttcaattttgccaggaacagtaccctcaactcagccgctgtcaccgtctcctcttagagctcactcgggccaggccctgatctgcgctgtggctgtccctggacgtgctgcagccctcctgtcccttccccccagtcagtattaccctgtgaagccccttccctcctttattattcaggagggctgggggggctccctggttctgagcatcatcctttcccctcccctctcttcctcccctctgcactttgtttacttgttttgcacagacgtgggcctgggccttctcagcagccgccttctagttgggggctagtcgctgatctgccggctcccgcccagcctgtgtggaaaggaggcccacgggcactaggggagccgaattctacaatcccgctggggcggccggggcgggagagaaaggtggtgctgcagtggtggccctggggggccattcgattcgcctcagttgctgctgtaataaaagtctactttttgctaaaaaaaaaaaaaaaaaaaaaaaaaaaaaaaaaa

SEQ ID NO: 152 - DNA, 910 bp, Homo sapiens
  SITE (877): n equals a,t,g, or c
  SITE (882): n equals a,t,g, or c
  SITE (887): n equals a,t,g, or c
  SITE (890): n equals a,t,g, or c
  SITE (902): n equals a,t,g, or c
gcggacgcgtgggcggttgcgctgcggagcgcagctgtgagggagtcgctgtgatccggggccccggaacccgagctggagctgaagcgcaggctgcggggcgcggagtcgggagtgcaggcctgagtgttccttccagcatgtcggagggggagtcccagacagtacttagcagtggctcagacccaaaggtagaatcctcatcttcagctcctggcctgacatcagtgtcacctcctgtgacctccacaacctcagctgcttccccagaggaagaagaagaaagtgaagatgagtctgagattttggaagagtcgccctgtgggcgctggcagaagaggcgagaagaggtgaatcaacggaatgtaccaggtattgacagtgcatacctggccatggatacagaggaaggtgtagaggttgtgtggaatgaggtacagttctctgaacgcaagaactacaagctgcaggaggaaaaggttcgtgctgtgtttgataatctgattcaattggagcatcttaacattgttaagtttcacaaatattgggctgacattaaagagaacaaggccagggtcatttttatcacagaatacatgtcatctgggagtctgaagcaatttctgaagaagaccaaaaagaaccacaagacgatgaatgaaaaggcatggaagcgttggtgcacacaaatcctctctgccctaagctacctgcactcctgtgacccccccatcatccatgggaacctgacctgtgacaccatcttcatccagcacaacggactcatcaagattggctctgtggctctgattgtgggtgtctccccctactcccagtggcttcttgacactatcaacaatcatgtgaagacttgtcnagaanagcanaanaatctacacttntttgccca

SEQ ID NO: 153 - DNA, 1767 bp, Homo sapiens
ggaaagggaaaacaactacggctgcggtgtggttggtggtgagatgacgaccttagtgctggataatggagcttacaacgccaaaatcggttacagccatgaaaatgtgtcggttattcctaattgtcagttccggtcaaaaacagcacgtcttaaaacttttactgccaaccagatagatgaaataaaagacccttctggactcttttacatcctcccttttcaaagggctacttggtgaattgggatgttcagagacaagtttgggattacctttttggaaaagaaatgtatcaggttgattttttagatactaatattattatcactgaacctactttaacttcacttcaattcaagaatcaatgaatgaaattctatttgaagaataccagtttcaagcagtattaagagtaaatgctggggctctcagtgcacataggtatttccgagataatccttccgaattatgctgtatcattgttgatagtggatattcctttacacatatagttccttattgtagaagtaaaaagaaaaaagaagcaattattcggataaatgtgggaggaaaactcttaaccaatcatctaaaggagatcatatcttacaggcagctacatgttatggatgaaacacatgtgattaatcaagtgaaagaagatgtatgctatgtgtctcaggatttttatagagacatggatattgcaaagttgaaaggagaagaaatacagtaatgatagactatgtcttgcctgacttcagtacaattaaaaagggcttttgtaagccaagggaagagatggtgttgagtggaaaatacaaatctggggaacaaattcttcgtttggccaatgagagatttgctgttccggaaatactctttaatccttctgatataggcattcaagaaatgggaattccagaagctattgtctattcaattcaaaatctacctgaagaaatgcagccgcatttttttaagaacattgtcttgacaggaggaaattcccttttcccaggatttagggatcgggtttactcagaagttcgatgtcttactccaacagattatgatgtttctgttgtgctgcctgaaaaccctattacttatgcctgggaaggtggaaaattgatatcagagaatgatgattttgaagatatggtggtaacaagagaagattacgaagaaaatggacatagcgtctgtgaagagaaatttgatatttaagcaacatttttgaatgaaagttgtgaccataaggtttaatttcaaagttccttttaaaagaggttaaggaactgtgttaccttttgtcctaagaaaaaggcttgaatttatgtaaatactttgatcgattgctaattttcaaaggcttcttaggtaggttactacagtaaactgtaactcagtccacattttcatttaggagctagactaccataacaatgcttatgctgtttccaagggtaggttatttttcattaaaagaagaatgaatgcattttaagtttaattcttcatagctgaaagcacaaatttaacggcttcactggacagttttccttagaaggtagttttgtgtgactgtgactaaactattttattttaaaatgtcattcttatttatacattctaaagttggaaagactgatcttatatgtgtataatgtttattttgtacctagagtacatttaaaagggtggagactaagctaataaagtttttttggccactacaaaaaaaaaaaaaaaaaaaaaaaaaa

SEQ ID NO: 154 - DNA, 1749 bp, Homo sapiens
  SITE (185): n equals a,t,g, or c
  SITE (1673): n equals a,t,g, or c
  SITE (1746): n equals a,t,g, or c
agttgtatgttaatccactggactgttacaatattcactggcctatcagaagaggtcagttaaatattcacccaggccctgggggctctcttacagctgttctggcagatattgaagtaatatggtctcatgcgatacaaaaatacttggaaatcccactgaaagatttaaagtattatagatgnatcttgttaattcctgatatctataataagcagcatgtgaaagaactagtgaatatgatactaatgaagatgggtttttcagggattgtggtccatcaggagtctgtgtgtgccacctatggaagtggcttaagcagcacgtgtattgtagacgttggggaccagaagacaagtgtatgctgtgtggaggatggggtgtctcatcggaatactcggctttgtctggcatacggaggatctgatgtgtcaagatgtttttactggctaatgcagcgagctgggttcccttacagagaatgccagttaacaaataaaatggattgtcttcttctgcaacaccttaaagaaactttttgtcatttagatcaggacatctctgggcttcaggaccatgagtttcagattcgacatcctgattctcctgccctgctttaccagtttcgattaggagatgaaaaactgcaggctccaatggctttgttttaccccgcaacttttggaatygttggacagaaaatgacgactttgcagcacagatctcagggcgatcctgaggatcctcacgatgaacattacctgctggccacacagagcaaacaagaacagtctgcaaaagctactgctgaccgaaagtctgcatccaaacctattggatttgaaggggatcttcgtggccagtcctctgatcttccagaaagactccattcccaggaggtagatttggggtctgcacagggagatggcctgatggccggcaacgattccgaggaggccctcactgcactgatgtccaggaagactgccatctcgctgtttgaaggraaagccctgggcctggataaagccatcctccatagcatagactgctgttcatctgacgacaccaaaaagaagatgtacagctccatcctagtggtgggaggtggtttgatgtttcataaagctcaagaatttctgcagcacagaattctcaacaaaatgccaccatccttcaggcgaattattgaaaatgtggatgtgatcacaaggcctaaggacatggacccccggctgattgcatggaaaggaggggcagtgttggcttgtttggatacaacacaggaactgtggatttatcagcgagagtggcagcgctttggtgtccgcatgttacgagagcgggctgcgtttgtgtggtgaatggggaggaaatgtcactgccgaagaccaaaaacaagcttcttggtataaaagactcttacagaatatgtgtattgtaatttattgatctggatgcttaagtgtcatggacagtaaatgaatttgaactttatgttgaggacatgacattggtttgaaaatataaactgcttttgagcagtttagtcagggcatttgagaataaataggaactttctcttcagttgtaaactctcttgccctctctcagggtctcataaactccccagtgatgtaaacgttgctattgaaggttctcatgtggtgaancccttcatttaagttggcttgaatctcatcagcaggcagcctcatgcaaccatgagggatagtatgtgacgangga

SEQ ID NO: 155 - DNA, 747 bp, Homo sapiens
gggaactgaacgcggttctgggagcagcaagcccacgggtagcagccgaggccccagaatggccaagtttctttcccaagaccaaattaatgagtacaaggaatgcttctccctgtatgacaagcagcagagggggaagataaaagccaccgacctcatggtggccatgaggtgcctgggggccagcccgacgccaggggaggtgcagcggcacctgcagacccacgggatagacggaaatggagagctggatttctccacttttctgaccattatgcacatgcaaataaaacaagaagacccaaagaaagaaattcttctagccatgttgatggtggacaaggagaagaaaggttacgtcatggcgtccgacctgcggtcaaaactcacgagtctgggggagaagctcacccacaaggaagtggatgatctcttcagggaagcagatatcgaacccaatggcaaagtgaagtatgatgaatttatccacaagatcacccttcctggacgggactattgaaggaggagaatgggagagcctcccctgggcctgaaaacttggagcaattaattttttttaaaaagtgttcttttcacttgggagagatggcaaacacagtggcaagacaacattacccaactatagaagagaggctaactagcaacaataatagatgatttcagccatggtatgagtagatctttaataaaagatttgtattgattttaaaaaaaaaaaaaaaaaaa

SEQ ID NO: 156 - DNA, 1150 bp, Homo sapiens
gcacgtggaagggttcccttcctcctacaagatggtgtgtgaggagccttcaatacgacccggggtgtaaagtgtccaactctagtaggggcctgatggcatccccgccgagtcccaggagagagagagaagaccccttcctggagtccagggctcccgggaagaaacactggcatttgtccctttgcttcggcttctggaggcagagactctgagcccagggagagccttctgcagccccatttcctcaaaaatccaacctgcccaggtggcgggtcatgagctgtgctcaggaagctggaatctgaccctggtggcgtcgggcccagtctccatggcagccgagcatttattacccgggcctccacccagcttggcagactttagacttgaggctggaggaaagggaactgaacgcggttctgggaacagcaagcccacgggtagcagccgaggccccagaatggccaagtttctttcccaagaccaaattaatgagtacaaggaatgcttctccctgtatgacaagcagcagagggggaagataaaagccaccgacctcatggtggccatgaggtgcctgggggccagcccgacgccaggggaggtgcagcggcacctgcagacccacgggatagacggaaatggagagctggatttctccacttttctgaccattatgcacatgcaaataaaacaagaagacccaaagaaagaaattcttctagccatgttgatggtggacaaggagaagaaaggttacgtcatggcgtccgacctgcggtcaaaactcacgagtctgggggagaagctcacccacaaggaagtggatgatctcttcagggaagcagatatcgaacccaatggcaaagtgaagtatgatgaatttatccacaagatcacccttcctggacgggactattgaaggaggagaatgggagagcctcccctgggcctgaaaacttggagcaattaattttttttaaaaagtgttcttttcacttgggagagatggcaaacacagtggcaagacaacattacccaactatagaagagaggctaactagcaacaataatagatgatttcagccatggtatgagtagatctttaataaaagatttgtattgaaaaaaaaaaaaaaaaaaaaaa

SEQ ID NO: 157 - DNA, 1338 bp, Homo sapiens
cgtcgtcccaggtctggcagaaagtggccaggttctgacgagcgttgccatcaagatataattcgtcattgataatctggaatgcgacatcgtcgcgcatttcgtgcagcggaaaacgttttgattctgcgatagtggaaatagacttcgcaccaaaacgtgaatcgagtagttccgaccttaaatccgttacttgcttcttatccattttaaactccttaaaatgattggatcgcattaaaaaagtaggatttatcgataaagtaagcaagtgcaaaggactcgtgtttaaataacaaaatcctaatgttatttatcgtgagatattacgcgaataatattttttcattgaaaaacaatacaatatgaaattcttgggtggtggtaaggtgttttatgctgttatttttatgcgcattctgtgtctcctgaattatcacgtaaaaatcagaccttaaaatatcactattagtacttgattattattttgaacgcatttataaaattattacataaaaatagcgaatattgctcggacgctgagttttcgcgttgacgatcacttttaatgcttcagcgatctctacactttcatcaacgtaaatatggcatacgcctataccacctgtgatcaccgggattgtcgactgttcacggcacagtttatgcaaaccagcgccaccacgcgggatcagcatgtcgatgtatttatccatacgcagcatttcactgaccagcgcacggtcaggattatcaatcgcctgcacggcacccgccggtaagccgcaggatttcagggcgtcctgaatcaccgccaccgttgcagcgttagtgcgacacgtttctttgccaccgcgcaggatcaccgcattaccggttttcaggcacagcgaagcgacatcaaccgtcacgttcgggcgcgcttcataaatcacgccaataacccccagcggtacgcgacgacgctcaagacgcaggccgctgtccagtacgccgccatcgattacctgccccaccggatcggcgaggttgcacacctgacgtacatcgtcggcaatgcctttcagccgtgcgggcgtcagtgccagacggtcaagcatcgcttcgctaaggccattggctcgcgcgtcagcaacatcctgggcgttagcgttgaggatgatttcgctttgtgcttccagttcatcggcgattttttccagcacgcgatttttttcgcggctggagagttgcgctaatttatacgaggcttgcttcgcggcaatgcccatttgttccagcatcagcctgctccttaacgggtaatcatgtcatcacggtgaacggcaaccgggccga

SEQ ID NO: 158 - DNA, 858 bp, Homo sapiens
  SITE (836): n equals a,t,g, or c
gcacgagggagtgccatcagctggcctatgctgatgaagccaagaagcgctctaacccatatgtgaagacttaccttctgcctgacaagtcccgccaaggaaaaagaaaaaccagcatcaagcgggacactgttaatccactatatgatgagacgctgaggtatgagatcccagaatctctcctggcccagaggaccctgcagttctcagtttggcatcatggtcgttttggcagaaacactttccttggagaggcagagatccagatggattcctggaagcttgataagaaactggatcattgcctccctttacatggaaagatcagtgctgagtccccgactggcttgccatcacacaaaggcgagttggtggtttcattgaaatacatcccagcctccaaaacccctgttggaggtgaccggaaaaagagtaaaggtggggaagggggagagctccaggtgtggatcaaagaagccaagaacttgacggctgccaaagcaggagggacttcagacagctttgtcaagggatacctccttcccatgaggaacaaggccagtaaacgtaaaactcctgtgatgaagaagaccctgaatcctcactacaaccatacatttgtctacaatggtgtgaggctggaagatctacagcatatgtgcctggaactgactgtgtgggacccgggagcccctggccagcaatgacttcctgggaaggggtcaggcttggtgttggcactgggatcakaatggggaagtggtggactggatggactcgactggggaagaaktgagcctgtgcaaaagatgcgacagtccccagggcttgggcanaaggactttggagctccgtcct

SEQ ID NO: 159 - DNA, 1208 bp, Homo sapiens
ggcacgagctgactaggacccctcccttctctcctgccctccctccagcccggggagtcccaggcagtgctgtgctgctgtttgaggtggagctggtgtcccgggaggatgggctgcccacaggctacctgtttgtgtggcacaaggaccctcctgccaacctgtttgaagacatggacctcaacaaggatggcgaggtccctccggaggagttctccaccttcatcaaggctcaagtgagtgagggcaaaggacgcctcatgcctgggcaggaccctgagaaaaccataggagacatgttccagaaccaggaccgcaaccaggacggcaagatcacagtcgacgagctcaagctgaagtcagatgaggacgaggagcgggtccacgaggagctctgaggggcagggagcctggccaggcctgagacacagaggcccactgcgagggggacagtggcggtgggactgacctgctgacagtcaccctccctctgctgggatgaggtccaggagccaactaaaacaatggcagaggagacatctctggtgttcccaccaccctagatgaaaatccacagcacagacctctaccgtgtttctcttccatccctaaaccacttccttaaaatgtttggatttgcaaagccaatttggggcctgtggagcctggggttggatagggccatggctggtcccccaccatacctcccctccacatcactgacacagctgagcttgttatccatctccccaaactttctctttctttgtacttcttgtcatccccactcccagcccctattcctctatgtgacagctggctaggacccctctgccttcctccccaatcctgactggctcctagggaaggggaaggctcctggagggcagccctacctctcccatgccctttgccctcctccctcgcctccagtggaggctgagctgaccctgggctgctggaggccagactgggctgtagttagcttttcatccctaaagaaggctttccctaaggaaccatagaagagaggaagaaaacaaagggcatgtgtgagggaagctgcttgggtgggtgttagggctatgaaatcttggatttggggctgaggggtgggagggagggtagagctctgcacactcaaaggctaaactggtgtcagtccttttttcctttgttccaaataaaagattaaaccaaaaaaaaaa

SEQ ID NO: 160 - DNA, 1233 bp, Homo sapiens
gtctggggcttccaaacccacgatgtcctgcctgacattgtcaccatggctaaagggattgggaatggctttcccatggcagcagtcataaccactccagagattgccaaatctttggcgaaatgcctgcagcacttcaacacctttggagggaaccccatggcctgtgccattggatctgctgtgcttgaggtgattaaagaagaaaatctacaggaaaacagtcaagaagttgggacctacatgttactaaagtttgctaagctgcgggatgaatttgaaattgttggagacgtccgaggcaaaggcctcatgataggcatagaaatggtgcaggataagataagctgtcggcctcttccccgtgaagaagtaaatcagatccatgaggactgcaagcacatgggactcctcgttggcagaggcagcattttttctcagacatttcgcattgcgccctcaatgtgcatcactaaaccagaagttgattttgcagtagaagtatttcgttctgccttaacccaacacatggaaagaagagctaagtaacattgtcagaaataaataaaaccacaagtctcaagaatttgccacgtatgttcaagggtgaatttgaagratttcagaaccactggtatccagagaaagcctgcagctctccacaggagctgtaaaagtcatggttgactgcctaccaaccatatttgttagcagagcccctcttatcttgagaactccattcttcagggaaagkatctccctagctcagagaataaatcctaattagtttatgttaggtatggtaatttgattcccctttgcagtgattggtttatgcatgaatatgtgatgtatttttgtccagtgaatcttgaagaaaaatcttttggtggaggtgccttcagggaaagttttcttcaccctcactcttcagttcaagaagagatgtcttcttgttgcgctgagaacaccatatgttcatgacgagattcctggcaccatgtcagccggcttgtagtcatgaggacaaccctttttggtgaggttggaagatggatggaagccaagtgcttagtgatgtcaaagaagcactcacttaagcattcctggagccaccctacctcagggcctcttgatatttgaggtaataaattcattgttctgtataaggcttttttatttttcactgttacggtcaaaagcatactgagaaatgaggcagaaaatactccc

SEQ ID NO: 161 - DNA, 429 bp, Homo sapiens
  SITE (361): n equals a,t,g, or c
  SITE (382): n equals a,t,g, or c
gagaagagggcagagcgtgcatggggctgctccccaggacctgagcaggaacctggagttttcagagctgcctgatcattgctacagaatgaactctagcccagctgggaccccaagtccacagccctccagggcmaatgggaacatcaacctggggccttcagcaacccaaatgcccagcccacggacttcgacttcctcaaagtcatcggcaaagggaactacgggaaggtcctactggccaagcgcaagtctgatggggcgttctatgcagtgaaggtactacagaaaaaagtccatcttaaagaagaaagaagcagaacmccatcatggcagaacgcaatgttgcttctgaaaaaantgcgggaccccttcctccttngggctgcgctactccttccaaaaacctgaaaaatcttcttcctgctc

SEQ ID NO: 162 - DNA, 1050 bp, Homo sapiens
aaagctggagctccaccgcggtggcggccgctctagaactagtggatcccccgggctgcaggaattcggcacgaggtgaaagtggggatccttccagatgagagccatcaggccacggttgcccaccgtggtgataaggtagatcaccaggaacaccaggaacaagggcgcctgcagctctagaagatctgtaagtccttggaggacggagttcataatctgtgtcttatccctcggcagtttagcctttgcagatgcatgcacttcatcttctgtgactcccaagatgttcgtacattttttatctaagaatcatatgatatccctggttgggtgcatgatccagttttatatttttgcttccggtgcaaacacaggaagtttcctcctggtagtgatggcctatgactgttatatggccatatgtaaccctttgctttatcctctagtgatgtccaataccttctgcattcaattatcaggtgtttcatttattattgtttttttcatcctataacgcatgtgggtttgttatttcaattaactttctgcaagtccaatgtaatacattatttctactgtgatattttacaactgtttaaaatttcctgtactgaccctggagtaatatgctcctggtttttgtattttcagtctttatacaatctttcacttttatgactatcatcgtctcttactcctatgtcctcttggccatcctgaaaaagaagtctgagaagggtagaaggaaagctttctccacttgcagtgcccatctgctttctgtctctttgttctatggcactctcttcttcatgtatgtgtgtcctgggtctggatcagctgcagatcaggacaaaatatattctttattttacatgataataattcctctggtaaatccttttatttacagtctgaggaataaagaggtcataggtgcattgaagagaataataaataaataaacagtttttaaggcaaatttctaacttcttctttttaaactttgcaaaaatagggggcctcgagggggggcccggtacccaa

SEQ ID NO: 163 - DNA, 1162 bp, Homo sapiens
  SITE (274): n equals a,t,g, or c
gcggccgccctttttttttttttttttttttttttttttttttttttttttttttttattccaaaactttaaacctttatttaaaagtgcctatgattcttgctgatgcacatgacaggtaaagctctactttaaactaggaactgcagatggactttgtatagtcttttgtcattaaacaccatctacagattgaaaggttctgcactgtctacttccaggactatattgcaatgctatgcacatagtagtgggtactcaataaatgcatgtnagaaaaatgaatgaatgttactgaagtagatttctcttaatttcttatgcaaaatgtctactaatatatatacattattgatataattacttccctttgtaagagcattagtcatttttatttttcctcatgtccttgtaaaatatttatcttagctattattataaattaattttgtggtattcatttcataccagtaaatccctcatgaagcacccccacagtattctctgcgaagaaatgaatttcagagtcagtcatgaataggaattgagtctcgttgattgagaaatcagtgacatttcacaggggtatgtgaaaaggtccggcttcattaactcaggtggcatctcctgcagtggccacatttccacccagatgaatgatggagcatatgttttctgacctttgctgtccatagattttctttgtctgtagttataccaaaaccgatgaatcatttctttaaatggtcttgtggtcagagtatagagaattgggttcaaagcactgttaatgggcagaataaaaatcactacccaagaggttatggtacctggtatttctacctgaagcagtgaaagaaatttcactacaaaaatgggtatccagcataatgcatcagtaaatactataaagaaaaaacgtttggcaaggatcatctcttttttaacttgattccgtatttcagttgctgttatggcactttgatgaacactataaaacatgcttccataggaaaaaactatgatgataaatgcggccaaattaataccaagaaaaattgccactgaataaatctgggccggacgcgtgggtcgacccgggaattccggaccggtacctgcaggcgtaccagctttccctatagtgagtcgtattagagct

SEQ ID NO: 164 - DNA, 1646 bp, Homo sapiens
gggtcgacccacgcgtccggaaagaatgctccacgtggtggatggtaaagtcccagatacactcaggaagtgtttctcagagggtgaaaaggtaaactatgaaaagtttagaaattggctttttctaaacaaagatgcttttactttctctcgatggcttctatctggaggtgtgtatgttaccctcactgatgatagtgatactcctactttctaccaaactctggctggagtcacacatttggaggaatcagacatcattgatcttgagaaacgctattggttattgaaggctcaatcccggactggacgatttgatttagagacatttggcccattggtttcaccacctattcgtccatctctaagtgaaggtttgtttaatgcttttgatgaaaatcgtgacaatcacatagattttaaggagatatcctgtgggttatcagcctgttgcaggggacccctggctgaaagacaaaaattttgcttcaaggtatttgatgttgaccgtgatggagttctctccagggttgaactgagagacatggtggttgcacttttagaagtctggaaggacaaccgcactgatgatattcctgaattacatatggatctctctgatattgtagaaggcatactgaatgcacatgacaccacaaagatgggtcatcttactctggaagactatcagatctggagtgtgaaaaatgttcttgccaatgagtttttgaacctccttttccaggtgtgtcacatagttctggggttaagaccagctactccggaagaagaaggacaaattattagaggatggttagaacgagagagcaggtatggtctgcaagcaggacacaactggtttatcatctccatgcagtggtggcaacagtggaaagaatatgtcaaatacgatgccaaccctgtggtaattgagccatcatctgttttgaatggaggaaaatactcatttggaactgcagcccatcctatggagcaggtcgaagatagaattggaagcagcctcagttacgtgaatactacagaagagaaattttcagacaacatttctactgcatctgaagcctcagaaactgctggcagcggctttctgtattctgccacaccaggggcagatgtttgctttgctcgacaacataacacttctgacaataacaaccagtgtttgctgggagccaatgggaatattttgttgcaccttaaccctcagaaaccaggggctattgataatcagccattagtaactcaagaaccagtaaaggctacatcattaacactagaaggaggacgattaaaacgaactccacagctgattcatggaagagactatgaaatggtcccagaacctgtgtggagagcactttatcactggtatggagcaaacctggccttacctagaccagttatcaagaacagcaagacagacatcccagagctggaattatttccccgctatcttctcttcctgagacagcagcctgccactcggacacagcagtctaacatctgggtgaatatgggtatgatgagcctgagaatgtttcctcagcatttaccgagaggtaacttaagaatgcagcaagaataccatgcatttccttaaaaaaaaaaaaaaaaaaaaaaaaaaa

SEQ ID NO: 165 - DNA, 1100 bp, Homo sapiens
  SITE (1058): n equals a,t,g, or c
  SITE (1092): n equals a,t,g, or c
atgaaatctttaaaatttgccaagttttagggactcccaaaaaaagtgactggccagaaggataccagctggcatcctctatgaacttccgttttccccagtgtgttcctataaacttaaaaactcttattcccaatgccagtaatgargctattcagctcatgaccgaaatgttgaattgggrtccaaagaaacgaccgacagcaagccaggcattgaaacacccatattttcaagttggtcaggtattaggcccttcgtcaaatcatctggaatcaaaacagtctttaaataagcagctgcaaccattagaatcaaagccatctttagttgaggtagagcctaagcctctgccggatataatcgatcaggttgttggacaaccccagccaaaaactagccagcagccactgcagcccattcagccgccacagaacctgagcgtccagcaacctccaaagcaacaragtcaggagaaaccgccacaaacgstattcccgagcatcgtcaaaaacatgccaactaagccaaatggcacactgwgtcataaaagtggtaggaggcgttggggtcagactatcttcaagtctggagatagctgggaagagttggaggactatgatttcggagcctcccattccaagaagccaagcatgggtgtttttaaagaaaaaaggaaaaaagattctccatttcggcttccagagccagtaccctcaggctccaaccactcgacaggggaaaacaagagcttacctgctgttacttccctaaaatctgattccgaattgtcaactgctccaacctctaaacagtactacttgaaacaatcaagatatcttccagggcagcatgacattatactacaaggactggcggatctgtgacactggccttcagggaaagagacgcaagagtcatagttactgacctgctactactaaccggctgtgtacttggagcaagattctggtttctgtaacttacgatgggactgcaccatctgtcaagctcactcttgtgtgaatccaagaaggtgtcctttgatagccagtggnaaaggaaataaacccccacacttggagcaccagntattccca

SEQ ID NO: 166 - DNA, 2745 bp, Homo sapiens
  SITE (2739): n equals a,t,g, or c
  SITE (2742): n equals a,t,g, or c
cgcagctcgaaattaaccctactaaagggaacaaaagctggagctccaccgcggtggcggccgctctagaactagtggatcccccgggctgcaggaattcggcwcgagtgtcgctcttcggacctcaaggttccccttaacacagagcgccccgcagtcttcgcggaaagcgttcggggtaggcgatggctgcgacgcgtgcagggccccgcgcccgcgagatcttcacctcgctggagtacggaccggtgccggagagccacgcatgcgcactggcctggctggacacccaggaccggtgcttgggccactatgtgaatgggaagtggttaaagcctgaacacagaaattcagtgccttgccaggatcccatcacaggagagaacttggccagttgcctgcaggcacaggccgaggatgtggctgcagccgtggaggcagccaggatggcatttaagggctggagtgcgcaccccggcgtcgtccgggcccagcacctgaccaggctggccgaggtgatccagaagcaccagcggctgctgtggaccctggaatccctggtgactgggcgggctgttcgagaggttcgagacggggacgtccagctggcccagcagctgctccactaccatgcaatccaggcatccacccaggaggaggcactggcaggctgggagcccatgggagtaattggcctcatcctgccacccacattctccttccttgagatgatgtggaggatttgccctgccctggctgtgggctgcaccgtggtggccctcgtgcccccggcctccccggcgcccctcctcctggcccagctggcgggggagctgggccccttcccgggaatcctgaatgtcgtcagtggccctgcgtccctggtgcccatcctggcctcccagcctggaatccggaaggtggccttctgcggagccccggaggaagggcgtgcccttcgacggagcctggcgggtgagtgtgcggagctgggcctggcgctggggacggagtcgctgctgctgctgacggacacggcggacgtagactcggccgtggagggtgtcgtggacgccgcctggtccgaccgcggcccgggtggcctcaggctcctcatccaggagtctgtgtgggatgaagccatgagacggctgcaggagcggatggggcggcttcggagtggccgagggctggatggkgccgtggacatgggggcccggggggctgccgcatgtgacctggtccagcgctttgtgcgtgaggcccagagccagggtgcacaggtgttccaggctggtgatgtgccttcggaacgcccattctatcccccaaccttggtctccaacctgcccccagcctccccatgtgcccaggtggaggtgccgtggcctgtggtcgtggcctcccccttccgcacagccaaggaggcactgttggtggccaacgggacgccccgcgggggcagcgccagtgtgtggagcgagaggctggggcaggcgctggagctgggctatgggctccaagtgggcactgtctggatcaacgcccacggcctcagagacccttcggtgcccacaggcggctgcaaggagagtgggtgttcctggcacgggggcccagacgggctgtatgagtatctgcggccctcagggacccctgcccggctgtcctgcctctccaagaacctgaactatgacacctttggcctcgctgttccctcaaccctgccggctgggcctgaaatagggcccagcccagcacccccctatgggctcttcgttgggggccgtttccaggctcctggggcccgaagctccaggcccatccgggattcgtctggcaacctccatggctacgtggctgagggtggagccaaggacatccgaggtgctgtggaggccgctcaccaggctttccctggctgggcgggccagtccccaggagcccgggcagccctgctgtgggccctggcggctgcactggagcgccggaagtctaccctggcctcgaggctggagaggcagggagcggagctcaaggctgcggaggcggaggtggagctgagcgcaagacgacttcgggcgtggggggcccgggtgcaggcccaaggccacaccctgcaggtagccgggctgagaggccctgtgctgcgcctgcgggagccgctgggtgtgctggctgtggtgtgtccggacgagtggcccctgcttgccttcgtgtccctgctggctcccgccctggcctacggcaacactgtggtcatggtgcccagtgcggcctgtcctctgctggccctggaggtctgccaggacatggccaccgtgttcccagcaggcctggccaacgtggtgacaggagaccgggaccatctgacccgctgcctggccttgcaccaagacgtccaggccatgtggtatttcggatcagcccagggttcccagtttgtcgagtgggcctcggcaggaaacctcaaaccggtgtgggcgagcaggggctgcccgcgggcctgggaccaggaggccgagggggcaggcccagagctggggctgcgagtggcgcggaccaaggccctgtggctgcctatgggggactgatgcctgagcgccacctactgcattttggacacctcacaccaaggggagatgcaccccacagacacctgggactttccccttctggttcctgtgtctcccaataaactctctgaccaaccctaaaaaaaaaaaaaaaaaaaaaaanaanaaa

SEQ ID NO: 167 - DNA, 326 bp, Homo sapiens
ggcacagtgtttttgaaatgttggagcagaacttatatgattttctaaagcaaaacaaatttagcccactgccactcaagtacatcagaccaatcttgcagcaggtggccacagccttgatgaagctcaagagtcttggtctggatccacgctgaccttaagcctgaaaacatcatgctggttgatccagttcgccagccctaccgagtgaaggtcattgactttggttctgctagtcacgtttccaaagctgtgtgctcaacctacttacagtcacgttactacagagctcctgaaattatcttgggttaccattttgtgaagct

SEQ ID NO: 168 - DNA, 663 bp, Homo sapiens
  SITE (604): n equals a,t,g, or c
  SITE (619): n equals a,t,g, or c
acccacgcgtccgatggctgctcgcggaggggcagtgtacgcggggccgctgtaggctgtccagcgatggatcccaccgcgggaagcaagaaggagcctggaggaggcgcggcgactgaggagggcgtgaataggatcgcagtgccaaaaccgccctccattgaggaattcagcatagtgaagcccattagccggggcgccttcgggaaagtgtatctggggcagaaaggcggcaaattgtatgcagtaaaggttgttaaaaaagcagacatgatcaacaaaaatatgactcatcaggtccaagctgagagagatgcactggcactaagcaaaagcccattcattgtccatttgtattattcactgcagtctgcaaacaatgtctacttggtaatggaatatcttattgggggagatgtcaagtctctcctacatatatatggttattttgatgaagagatggctgtgaaatatatttctgaagtagcactggctctagactaccttcacagacatggaatcatccacagggacttgaaaccggacaatatgcttatttctaatgagggtcatattaaactgacggattttggcctttcaaaangttactttgaattangagatattaatatggatgggatatccttacaacaccatcaatgg

SEQ ID NO: 169 - DNA, 2810 bp, Homo sapiens
ggcacgaggcttcatgcgcgtcagcctgctgccggacgagcagatcgtgggcatttctcggatccagagaaatgcctactccatcttctttgatgagaagttctccatccccctggatcccacagccctggaggagaagagcctgcggttttctgtatttggcatcgatgaggatgagcgcaacgtcagcacgggggtggtggagctgaagctttctgtgcttgacctcccgctgcagcccttcagtggctggctctatttacaggaccagaacaaggccgccgatgctgtgggggagatcctgctctccctcagctacctccccacagccgagcgcctcaccgtggtcgtggttaaggccaagaacctcatctggaccaacgacaagaccacagcggaccccttcgtcaaggtgtacctgctgcaggatgggaggaagatgagcaaaaagaagacagccgtgaagagggatgaccccaacccggtgttcaacgaagccatgatcttctcggtgccagccattgtgctccaggacctgtctctccgcgtgacggtggctgagagcagcagcgacggccgtggggacaacgtgggccatgtcatcattgggccgtcagccagtggcatgggaaccacacattggaaccagatgttggccacgctgcgcaggcccgtgtccatgtggcacgctgtccggcgaaactagcaaccagggcgggccagttgggcaatggagctgctggagcccggtacccactcagctctgtctgatgccctctccatagcccagctggagccgtgaacactggggtcccctggcagagtcctcatgacccatcctggtctctctgtccagattgcagcagaggagtgggcgtggctctgtgtccagggccccagggtctgctcctgctgaggaccagctgtggctgggccaggacagaggactcaaccctgctcctcccggtaggccagctgccgagccgggctatgttctggaacccagtgaatcttgggggccaggcactgtgctaggcaccagcaggggtaacacgaagaagacccggcccttagggcatcaggaagactagctcccctgccccggaggatctgctcagtgctgatggcagcccagctgtgtggactcagggggctctgagggctagggaaacaggaagggcctctttgacaaggtaggagctgtgcttggaggggcaggaaaagaactgagcatgtcgcaggcagcgggcccagcctgagcaatggcaggatgtgaacttccccatcgcaaatgcagttctcagcccactgcagtggatacaaggaagggcctttctcggggccggagaagagaccaagagaccaggcccgggcagcagcctaccggccacgtggaacactggctccggagttattctctgtcaaatctactccccggacctcaaccatggcaagaaccagaggtccaaagaggcccagacccaggtccttgtgctcagtcctgcgcaaaccaggcccagaccctgcaagcatttgttgatgcccttgcaggcccactgggagaaagatgcctcaggcaggtctcagcctggggttggcaggggtggggcatagagaatactgacagcagaggtcttggtgggctgcacgtgcctgcgaagatgtggtggacaaggaggctctcgggctgggccttggaggggtggcagcggaaggacagcccaggtggctgaggcctgatgggaagccggggaaggccagggtggaagggcggcttgagggacgccaggagaagactgaatgccaggctaggaaggaggcggctctcgatcacggggtgggtgcccccgacaccgggtctcctagcttgagttccctagaagcgaaatctgagagggggattctggggcaagtagtttcttgcgggtgagtgttctcagagaaacttaccagatcaagaaagggagctcaggctggatggaggaagccacgcaagtgtggcttcaagatccatcgccttggcctgatcgctgtgggggcaggggcctggagtacgaggggcaccctgggggctcccacccagaagcagaggggctgggctgttgcacctctactggcatcagtctttggttaccccccagccccagtaggaggagagcaggcagagcttgtcatccccagcctggtgtcccgcagtcccaggaagccgcttcttgccttcatggctgagtgctgggaagggctgagctcacccaggccagcaggtggggtatcatctgctcggtggggccacccacaggtgtcagcatggaccctcaggctggctgcccctgttccttggtccataactggtgagctatggagacccaggccaccaaattatccccagttatatggggggaggaggggctagaacaagggcccaggggactggaggcaggatggtggctttccctacctgacacagccatggcccagccccaaggccaggctgtctaccctatggccacagcaggaggtcagcccagggccaggagacacatggctggacaaggctttgcagcctgggagaccccgactttctctaacccagtggctgtgcggtgcaggccactgactccccccctgccctctcccctctctccctccccctaactgcatgacatgttaactgtgtgcccaggacagccgtggtggggaccgggtatgccaactggaatgattctagaaccaaaataaagttggggcaggaagagggggcttccagggagccctgctcggccctgaatcacaaaaaaaaaaaaaaaaaa

SEQ ID NO: 170 - DNA, 1275 bp, Homo sapiens
tcgacccacgcgtccggtcttctgtgagtggcagtgtgatgagtgtttatagtggagactttggcaatctggaagttaaaggaaatattcagtttgcaattgaatatgtggagtcactgaaggagttgcatgtttttgtggcccagtgtaaggacttagcagcagcggatgtaaaaaaacagcgttcagacccatatgtaaaggcctatttgctaccagacaaaggcaaaatgggcaagaagaaaacactcgtagtgaagaaaaccttgaatcctgtgtataacgaaatactgcggtataaaattgaaaaacaaatcttaaagacacagaaattgaacctgtccatttggcatcgggatacatttaagcgcaatagtttcctaggggaggtggaacttgatttggaaacatgggactgggataacaaacagaataaacaattgagatggtaccctctgaagcggaagacagcaccagttgcccttgaagcagaaaacagaggtgaaatgaaactagctctccagtatgccccagagccagcccctggtaaaaagcttcctacaactggagaagtgcacatctgggtgaaggaatgccttgatctaccactgctaaggggaagtcatctaaattcttttgttaaaggtaccatccttccagatacaagtaggaaaagccgccagaagacaagagctgtagggaaaaccaccaaccctatcttcaaccacactatggtgtatgaggggttcaggcctgaagatctgatggaagcctgtgtagagcttactgtctgggaccattacaaattaaccaaccaatttttgggaggtcttcgtattggctttggaacaggtaaaagttatgggactgaagtggactggatggactctacttcagaggaagttgctctctgggagaagatggtaaactcccccaatacttggatttaagcaacactgcctctcagaatgcttttgattgccaagatttccaaatgagcccaaattcctctggctcctccgctgaaaactcctaaaccggtggaatctgatcttgaaaatctgagtaggtggacaaatatcctccctttctatctattgcacctaaggaattctccccagcatgtaaaagccaatctgcatgtgcttctttgatttcaaggcccaagggatttaaatataccaaaatgtgtaatttgtgactctaatattcaattagatatttgaacaaaaaaaaaaaaaaaaaaaaaaaaaaaaaaaaaaaaaaaaaaaaaaa

SEQ ID NO: 171 - DNA, 705 bp, Homo sapiens
  SITE (571): n equals a,t,g, or c
  SITE (609): n equals a,t,g, or c
  SITE (613): n equals a,t,g, or c
  SITE (622): n equals a,t,g, or c
  SITE (699): n equals a,t,g, or c
  SITE (701): n equals a,t,g, or c
gctcaaggccatggattccaacgggttgagcgatccctacgtgaagttccggcttgggcatcagaagtacaagagcaagattatgccaaaaacgttgaatcctcagtggagggaacaatttgattttcacctttatgaagaaagaggaggagtcattgatatcactgcatgggacaaagatgctgggaaaagggatgatttcattggcaggtgccaggtcgacctgtcagccctcagtagggaacagacgcacaagctggagttgcagctggaagagggtgagggacacctggtgctgctggtcactctgacagcatcagccacagtcagcatctctgacctgtctgtcaactccctggaggaccagaaggaacgagaggagatattaaagagatatagcccattgaggatatttcacaacctgaaagatgtgggatttctccaggtgaaagtcatcagagcggaagggttaatggctgccgacgtcactggtaagagatgatgcaattctcctawtgctcagatcaagcagcacacaagggctacccatttaataatttaacttttgcantttacctgatggatcatcaaaataaataatttaaagantcanggatgatcntagaaatatttgccaacccctgattttatagaactctgctttttaaaggcagggtaatggattaaaaataaaccctnanaacc

SEQ ID NO: 172 - DNA, 3160 bp, Homo sapiens
gctgggaccactgccccaccccgagaggagagaacagggggagtcgggggctacccagcagttggagccagagaggaccgaatgagccacccctccggaccctattcccaagcatctgcagctgccccccagcctgctgcagcccgccagccaccacccccagaggaggaggaagaggaagccaacagctacgattcggatgaagcaaccaccctgggtgccctggaattcagccttctctacgaccaggacaacagctccctgcagtgcaccatcattaaggccaagggcctgaagcccatggattcaaacggcttggctgatccctacgttaagctgcacctcctgccgggagccagcaagtccaacaagcttcgtacaaaaactctgcggaatacccggaaccccatctggaatgagaccctcgtgtatcacggcatcaccgatgaggacatgcaaaggaagaccctcaggatctccgtctgtgatgaggacaaattyggccacaatgaatttattggtgagaccagattctccctcaagaaactgaagcccaaccagaggaagaatttcaacatctgcctggagcgagtgattcctatgaaacgtgctgggaccaccgggtcagcccgaggcatggccctttatgaggaagagcaggtggagcgtgttggtgacatcgaggagcgtggcaagatcctggtctccctcatgtacagcacacagcagggaggcctcattgtgggcatcatacgctgcgtgcacctggctgccatggacgctaatggctactcagacccattcgtcaagctctggctgaaaccggacatgggaaagaaggccaaacacaagactcaaattaaaaagaaaaccttgaatcccgaattcaatgaggagtttttctatgacatcaaacacagtgacctggcaaagaagtcactggacatttcagtctgggactatgacatcggcaagtccaatgattacatcggaggctgccagctggggatctctgccaagggagagcgcttaaaacactggtacgagtgtctgaaaaataaagacaagaagatagagcgctggcaccagctacagaatgagaaccacgtgtcaagtgattaggctagtgcccaggtccccatctccatgtcccgggtcccccccagcctgctctagctgcccaccgcaccctgatctctcttctctatgcctacctccccccataccctgctgatctccctgagcctgcctttgagcccccgtcacgttgggcactgctgccaaagactccctcctccctgatgctgggatgtgggctctgaatacagcccctctctcatccctgggatggagcaatggggatggggttggggagacgtttacaaagaggttgatcatttaataacctctcagtttgggtaaattacaaaggttcttcatcatttaggactgtttttagaccctcctagccttgaacacacacatgtacacacacacacacacacacacacacacaccctttcattccctgtgttgtgtctctgtatatccccagttgtcagcagacccggacaatgctgtgagagaagcattggggcacaaatagagcctccgggctcccactgccccctgagatgtacaccctgattgccaggaaaacagactgctgtgttcagtaacacacctgtgtgcttcctagcaaaacaaaaacaaacgacaacaacaaaaaacccttcctctgtcaccttttctcctcctccctcttctttcccttccatgatagtagattctctctttctcagcctctcccctctcctttctctccctgcctttcttccctttgcctttctctctctctaaagcagtaacaccgcaaaaacracagcaaaaaaagtgtatgttaacctagcctcacccccttgctctcaccagcctgaccaggaaactgagaaactggcccaaacctgagattccacttgggcccacgcttcttaactgacccactcctcccgttggcagaaccagacattcccagggcttgggccaatggctggcactgccctgagtgcatggcagcatccctcaagctgtgtagatgccccatagaggactctctcatccgtgggctccccgggtgggcacggaggcatttagaagaccagggccatgggtctgaggaagcctcagccaaagcctccagcctttctcctttctccgctcttaggtaaatgaacaagctaccctcctccccaatgcccttgactctgtttcattgactcttttgcatcccatctctcactcagaaccccctccagtctctctgtctctctttgtctgtctctctgtctcctgcactctcgttactaagcttcctgggagaatcaaataatatcatggctatggaacagtagagagagacaggcctgatgccaaaggctttgggctcatcatcaatctttcactttcttcctataaaaaaaattattttataaaggaggaaaaggcaatgtgggcaaacattacaaatttgaggttgaagtcaggcaatcttcaatgccctgtgagaaaggttcgattttcccaattttgatgaagtcttccctcatgaaaatcactcccagtcatcccaaacccctgacattctctacagaagcatcagacagatactcaaactctcactttccccaaatcacatctcttaacttttcaacgccctccaccctcagctccctgcacaattcatgggaggactcatttcttgccttgaataaccattttctaaacatcgagctcttcaccttccccaaggtggccaacagcttcctggctgccatctttccttttgaccttatctttccccattagtccctggtggcacctactctcagcccacctccctcaccacagtttccccttaggagacagcatgctggctgtgtcgcccaagcctgatgctggtgtaggcgctggaatcagcatgcagcaagctcacagtgcccctagtctgggtgcccgctgtccccgacaaatgtaaccacctccctgcctagaatacacacacgtctccggtgcatgcacaaccacccagcatctttctttgtgatgatgtagccaaaaataaagtaggagcatccaagaaaaaaaaaaaaaaaaaaaaaaa

SEQ ID NO: 173 - DNA, 1453 bp, Homo sapiens
gggctgcaggaattcggcacgagctctggagaggcaggcacaggggcaccctgtggccgtatcagcttcgccctgcggtacctctatggctcggaccagctggtggtgaggatcctgcaggccctggacctccctgccaaggactccaacggcttctcagacccctacgtcaagatctacctgctgcctgaccgcaagaaaaagtttcagaccaaggtgcacaggaagaccctgaaccccgtcttcaatgagacgtttcaattctcggtgcccctggccgagctggcccaacgcaaactgcacttcagcgtctatgactttgaccgcttctcgcggcacgacctcatcggccaggtggtgctggacaacctcctggagctggccgagcagccccctgaccgcccgctctggagggacatcgtggagggcggctcggaaaaagcagatcttggggagctcaacttctcactctgctacctccccacggccgggcgcctcaccgtgaccatcatcaaagcctctaacctcaaagcgatggacctcactggcttctcagacccctacgtgaaggcctccctgatcaggaggggcggcgtctgaagaagcggaaaacctccatcaagaagaacacgctgaaccccacctataatgaggcgctggtgttcgacgtggcccccgagagcgtggagaacgtggggctcagcatcgccgtggtagactacgactgcatcgggcacaacgaggtgatcggcgtgtgccgtgtgggccccgacgctgccgacccgcacggccgcgagcactgggcagagatgctggccaatccccgcaagcccgtggagcactggcatcagctagtggaggaaaagactgtgaccagcttcacaaaaggcagcaaaggactatcagagaaagagaactccgagtgaggggtctggcctaggcccgggatcggaccaggctccctcaggaccccatcctttcctgcccggaccgtgaattcatctccttgaagccataacgtccgagctgctggtgcggggcagccctggccctaggcttcctaaccctggaagcgagaggatgagaggaggccggcccagctccttctttcagggtgggggtcattcagcctccactgtgtctgtcttttcttccctggggctccccctcgaggcgaggggccatgcatgtctgggggacccctgccccccaaaaccctctgtctgtctctgtctctttgctgtttgtccaagactcagtgtcccgacccttgttctcgccgtgaatgtcaatgggccaatcctctctgtcctttcagacaaaaaaaaaactgtgtcccccccttctgttcgccacaccctgcgtctggccggtccccccactgctgctgctatcaacgccagaataaacccactctgtgggtctccctccaaaaaaaaaaaaaaaaaaaaaa

SEQ ID NO: 174 - DNA, 856 bp, Homo sapiens
  SITE (844): n equals a,t,g, or c
gctcgtgccgaattcggcacgagccttgtcctcagctttgaccgcttctctcgggatgatgtcattggcgaggtcatggtgccactggcaggggtggaccccagcacaggcaaggtacaactgaccagggacatcatcaaaaggaatatccagaagtgcatcagcagaggggagctccaggtgtctctgtcatatcagcctgtggcacagagaatgacagtggtggtcctcaaagccagacacttgccgaagatggatatcaccggtctctcaggtaatccttatgtcaaggtgaacgtctactacggcagaaagcgcattgccaagaagaaaacccatgtgaagaagtgcactttgaaccccatcttcaatgaatctttcatctacgacatccccactgacctcctgcctgatatcagcatcgagttcctcgttatcgacttcgatcgcaccaccaagaatgaggtggtggggaggctgatcctgggggcacacagtgtcacagccagtggtgctgaacactggagagaggtctgcgagagcccccgcaagcctgtggccaagtggcacagtctgagcgagtactaatcctgttcttctctcctctaatccccgggggccaagctggggagggatgtggaggggaaaaagatgacagagaagtggmttccaaacctcattttagttgttagaagaaatttcttacaaaacaattccacaaagaacacctatatgaccacagttgcagatcattcttagcatgatgtttttttttctgtttgcaaggcgttagatcttttattttatttattttttttgaggtggggtttcgtcttgttgccgngttgggtgcaat

SEQ ID NO: 175 - DNA, 2105 bp, Homo sapiens
ggcacgacatgggcccgtttgtggagcggggacctgacgaggccatggaggacggcgaggagggctcggacgacgaggccgagtgggtggtgaccaaagacaagtccaaatacgacgagatcttctacaacctggcgcctgccgacggcaagctgagcggctccaaggccaagacctggatggtggggaccaagctccccaactcagtgctggggcgcatctggaagctcagcgatgtggaccgcgacggcatgctggatgatgaggagttcgcgctggccagccacctcatcgaggccaagctggaaggccacgggctgcccgccaacctgccccgtcgcctggtgccaccctccaagcgacgccacaagggctccgccggatgagccggcccccctcccatggccctgctgtggctccccagctccagtcggctgcacgcacacccctgctccggctcacacacgccctgcctgccctccctgcccagctgtaaggaccgggggtctccctcctcactaccgccagacaccccggtggaagcatttagaggggaccacgggagggacaaggcttctctgtccgcccttcacacctccagcctcacgttcacttaggcacatcacacacacactggcacacgcaggcatccatccatccgtcattcattcaaatatttattgagcacctactatgtgcccagccctgttctaggcactgggcattaccatagagaacaaaatagacaaatacatctgccctcatggaaggtgacgttcccaggagagggcacctacacagtcacgcaaacacacactaattcctggcagggcccccagcccctcccctggctgagcagccctgtggctgaaatgactagcagataaacagacccccttctgctccgcttcctcctgcccagccaggcaacaccctcaaccggctccatcacatcctcaggtctcgggaccatggggggctcagaggggagacacacctactgcttcctcagatgggcccctccgcagccccttcccttgctcggggaaagcccccaattctgcccacacccatttatttccttccttccttccttcttttctttccttccttccttcttttttgtttttgcccccaattctgcccatacccatttctttctttccttccttccttcttttttgtttttgcccccagttctgtccacaccccttccctttcctgtcctgtcctttctttcttttttgatagaatcttgctctgtcgcccaggctggagtgcagtggtgagatctcagctcactgcaacctccacctcctgggttgaagtgattctcgtgcctcagcctcctgagtagctgggactgcaggcacgcgccaccacgcccagctaatttttgtatttgagtagagacggggtttcaccatgttggccaggctggtctcgaactccgcatctcaggtgatctgctcgccttggcctcccaaagtgatgggattacaggcatgagccaccgtgcccggcttcacacccatttctttaaaaaggatcccgtagcaggcagaaaagccccttccatcctgctcctctgatactgtgcccccttggagatatttccgtcctccacccacgtgtctgtggctggaactgcccagcctgctcctggccccctggaagcctccccacagctggtaatctggacttaaggattgctgggccaccgcctctctgcctaccaccattccatatttaagtggagcccctacgtagaaaggccccggggctttattttagtctccttttcagggatgtcgtgggcgggggagggggttcttggtgctacagccctctccccacccctaaagggacgccgacgctgtttgctgccttcaccacatattagtgcttgaccctggcaggggaccccatggaaaagatggggaagagcaaaatacatggagacgacgcaccctccaggatgctcgctgggattcccacgcccaccactgtcccccaccccatggctgggaggggcctctgaacggaacagtgtccccacagagcgaataaagccaaggcttcttcccaaaaaaaaaaaaaaaaaa

SEQ ID NO: 176 - DNA, 3746 bp, Homo sapiens
ggtcgacccacgcgtccggaaaacttatggaaagaaaatcttagaaaggaggaagaagaaaaacaaaagcgactccaggaagaaaaaacacaagaaaaaattcaagaagaggaacggaaagctgaggagaaacaacgtgagacagctagtgttttggtgaattatagagcattatacccctttgaagcaaggaaccatgatgagatgagttttaattctggagatataattcaggttgatgaaaaaaccgtaggagaacctggttggctttatggtagttttcaaggaaattttggctggtttccatgcaattatgtagaaaaaatgccatcaagtgaaaatgaaaaagctgtatctccaaagaaggccttacttcctcctacagtttctttatctgctacctcaacttcctctgaaccactttcttcaaatcaaccagcatcagtgactgattatcaaaatgtatctttttcaaacctaactgtaaatacatcatggcagaaaaaatcagccttcactcgaactgtgtcccctggatctgtatcacctattcatggacagggacaagtggtagaaaacttaaaagcacaggccctttgttcctggactgcaaagaaagataaccacttgaacttctcaaaacatgacattattactgtcttggagcagcaagaaaattggtggtttggggaggtgcatggaggaagaggatggtttcccaaatcttatgtcaagatcattcctgggagtgaagtaaaacgggaagaaccagaagctttgtatgcagctgtaaataagaaacctacctcggcagcctattcagttggagaagaatatattgcactttatccatattcaagtgtggaacctggagatttgactttcacagaaggtgaagaaatattggtgacccagaaagatggagagtggtggacaggaagtattggagatagaagtggaatttttccatcaaactatgtcaaaccaaaggatcaagagagttttgggagtgctagcaagtctggagcatcaaataaaaaacctgagattgctcaggtaacttcagcatatgttgcttctggttctgaacaacttagccttgcaccaggacagttaatattaattctaaagaaaaatacaagtgggtggtggcaaggagagttacaggccagaggaaaaaagcgacagaaaggatggtttcctgccagtcatgttaaacttttgggtccaagtagtgaaagagccacacctgcctttcatcctgtatgtcaggtgattgctatgtatgactatgcagcaaataatgaagatgagctcagtttctccaagggacaactcattaatgttatgaacaaagatgatcctgattggtggcaaggagagatcaacggggtgactggtctctttccttcaaactacgttaagatgacgacagactcagatccaagtcaacagtggtgtgctgatctgcaaaccctggacacaatgcagccaattgagaggaaaagacagggctatattcatgagctgattcagaccgaagagcggtacatggctgaccttcagctcgtcgtcgaggtttttcagaaacgcatggcagagtcaggctttctcactgaaggggagatggccctgatttttgttaactggaaggagctcatcatgtccaacacaaagctgctgaaggctttgcgggtgcggaagaagaccgggggcgagaagatgccggtgcagatgattggggacatcctggccgctgagctgtcccacatgcaggcttacatcaggttctgcagctgccagcttaatggagcagctctgttacagcagaagacagatgaagacacagatttcaaagaatttttaaagaagctggcatctgacccgcggtgtaaaggaatgcccctctccagcttcctgctgaaacccatgcagaggatcacccgctacccactgctcatcagaagtattctggagaacaccccggagagccatgcagaccattcctccctaaagctggccctcgagcgggcagaggagctgtgctctcaagtgaatgagggagttcgggagaaggaaaactcggaccgactggagtggatccaggcgcacgtgcagtgtgaaggcctcgcggagcaacttattttcaactctctcaccaactgcctggggccccggaagctcttacacagtgggaaactatacaagaccaagagcaacaaggaactgcacggattcctcttcaatgacttcctgcttcttacctacatggtcaagcagtttgctgtttcctctggctctgagaaacttttcagctcgaagtccaatgctcaattcaaaatgtataaaacgcccattttcctgaatgaagtcttggtgaaactgcccacagacccttccagcgatgagcctgtcttccacatttcccacattgatcgggtctacaccctccgaacagacaacattaatgagaggaccacctgggtgcagaagatcaaggcggcgtctgagcagtacatcgacaccgagaagaagaagcgtgagaaagcttaccaagcccgctcccaaaagacttcaggcattgggcgcctgatggtgcatgtcattgaagctacagaattaaaagcctgcaaaccaaatggaaagagcaacccatactgtgaaatcagcatgggctcccagagctacaccaccaggaccatccaggacacactcaatcccaagtggaattttaactgccagttctttattaaggatctctaccaagacgtgctgtgtctcaccctgtttgacagagaccagttttcaccagatgatttcctgggtcgtactgaaattccagtggcaaaaattcgaacagaacaggaaagcaaaggccctatgacccgccgactgctgctgcatgaggtccccaccggggaggtctgggtccgttttgacctgcagctttttgagcaaaaaactctcctgtaggggttctaaaggacagcaccagcgggacagcccacaaggctggggctggagaatgagagactgcgctctcttggggctgagggagcaccatgcagcttcacccctcacaaagccatgcacgctgggggctctgctttcctgcacactaaatagctagcaatctatgcaaacacctttcctataaagaaaccaaaccccatagtacagtgccttgtcctagtgttcacatgttcagctctgtttgtttagatgccaaggtttccattttcagggctataaaaagtattacttggaaatgaggcatcagaccaccagatgttaccgctcggttgaatgtgtccaccgtggagtggtttggtgacgctgtaaccattccacgccagtgacctctgctgggtcacagccactcaggaggggaagggtcaggatgagaggctgcagcctcgacacttggcgcggcctgatactgaaatagcgtctactcgtgcactgaataaaaacagaaacttgatcattttattcctgattagattttatcactctctgctaagacaatatagtctggagtataagtgggaaagcttgatttaaatactgtgaactctaataatgtggaaaatatttttcaactttaattttctgaagtataaattatttatgtaaattcattgtttttgcatatttcttaggacatgcatctttaagctttatcattgcccatatgtacagaaagagaataaagacatatgtttatggataaaaaaaaaaaaaaa

SEQ ID NO: 177 - DNA, 810 bp, Homo sapiens
tttttttttttttttttttccaaaaacaccattttaataaggaaacaacagaaataaaagattgttctctggctggagcccagaccccatataatacattacatgtacaaagtggcttggtggcatytcctcctaggtggtatatacaggaggtggagggacagcaggaagcaaggagccttgctgytggactgtggtgcaagtctgagttgacttccctagactgcccccacctagatggagacttcatattctctcgtctctccagtctcgtaagttggattgtcaaacgctgactctatggtaatgcggttgtaggggcgggggcgggggcgggtattccacctcataggaatcatacactggtggggcctccacgttgtccccattgcgaatgatgagcctgtcatcatcctctgccagggaaaccttctcaaagtgcaggtgtagccgctggccctcaggagcctcaagcagccagtgacaggtgaggttgttgctgtagttgcccgggaagcctggagagacgatgcggccggtggtggcattgcggatcactccgccgcaagcagcgatgcakacgggctcctttgaatcccagawgggctgggtggcattgagacaggtgagatgcctggcgcccttcagctggtagccagtggcacaatggaagcgggcactaccccctgggtggaggctggtgacagtcacatctccataagctggacgacggggaaagtggcagctcaggagataggcttggtaatggaaatggaaggtgccagggccagccggtggcgggaggctctg

SEQ ID NO: 178 - DNA, 1095 bp, Homo sapiens
ggcacgaggggaacctcaggcttcagagagccgaaaagttgggaggcgtaaccacttacaggccggaagtgtccggggtggacgcattcgggtagccgaagaagtcccaggattgccgaagaagtcccaggatttccgaagcgagccgaagcatcgcgacagttttcagagacagctgatcggttggagctcttgcgccgagcagtcatggcggcggccagagctactacgccggccgatggcgaggagcccgccccggaggctgaggctctggccgcagcccgggagcggagcagccgcttcttgagcggcctggagctggtgaagcagggtgccgaggcgcgcgtgttccgtggccgcttccagggccgcgcggcggtgatcaagcaccgcttccccaagggctaccggcacccggcgctggaggcgcggcttggcagacggcggacggtgcaggaggcccgggcgctcctccgctgtcgccgcgctggaatatctgccccagttgtcttttttgtggactatgcttccaactgcttatatatggaagaaattgaaggctcagtgactgttcgagattatattcagtccactatggagactgaaaaaattccccagggtctctccaacttagccaagacaattgggcaggttttggctcgaatgcacgatgaagacctcattcatggtgatctcaccacctccaacatgctcctgaaaccccccctggaacagctgaacattgtgctcatagactttgggctgagtttcatttcagcacttccagaggataagggagtagacctctatgtcctggagaaggccttcctcagtacccatcccaacactgaaactgtgtttgaagcctttctgaagagctactccacctcctccaaaaaggccaggccagtgctaaaaaaattagatgaagtgcgcctgagaggaagaaagaggtccatggttgggtagaagaatgtgtatgacaaccacacacagtgaagctcttttttcaaagtaaatttgaagaaatgctacaagtatgagatgagatctaagtaaaggtgttaagatatttaaaaaaaaaaaaaaaaaaaa

SEQ ID NO: 179 - DNA, 1564 bp, Homo sapiens
ggcacgagaagaaaatgaactaattccttccataatcaggggaagagctactggaatcactggaaactttgctaatattgggggagccctggcttccctcatgatgatcctaagcatatattctcgacccctgccctggatcatctatggagtctttgccatcctctctggccttgttgtcctcctccttcctgaaaccaggaaccagcctcttcttgacagcatccaggatgtggaaaatgagggagtaaatagcctagctgcccctcagaggagctctgtgctataggtctgtgctgaggaaagcaaaacaccatttagggctaccatcccccaaaaaggcttagatctgggctattcccatgtagtcagtgcctttgcctttggtgtatcctcatcccttccacagtgacctcatacatcccctgagcctcactagatcacacagaccatctctgcccagcctgtccaggaggttaatttgtggtgaaaagaccaaaattaggtgacctctgcccttcctgccctggtatgacatgcatactcttgaaggtattctacaaacatgcagggatccaaacaccatcttctcatccctggggagccctcagcccagtgagtgtacctgttagctgtctgggattgccagtgcttacaggcctgactcccaggacactgaagaatttgtgagagactgtatagaaaataagagcccctcccaaagatgagaagtccttttgtatcacatgtgagattcagtctatctaattttcacgggggaaaaaaagcgttggaaaaggggaaaagaagtgataagtaaaggaattttttaagtaatgaagaatgagaaaaggttctaaaacttttctgtgcttctcttgccttttccaaaatccctttggtcaatgccatggtgtccaagtgtgagagttgaagctattcaagctgccttcccagatcctaggctgggagcttggtttttttacttcacaaggtttacacaaacacttgcgggcagaggcatgttttttattaaagctagtgggcaaagaatcagtatgtcctaaagaatgcaggacttatatgtttagtccatgtctttcatttttgagcttttttgtttgttggtttcattatatttgcaccaggagaagatgctccagaaaagcagggcaggaagatacctgcagcaaagtgacacaattttaaggaattccaggtgctgattgctgattaaacagcaagataaaggaaaaatcgagaccatttctagatactactaaaatttagaaaataaataaataacaagatataatggataaatacattccatttacaactgtgattctaaatggttaaatataaaatatctacaaataatcataagaagtttgaagaaaatcataacactttaaaaggaatcataatagaacatttgtataattatatacatctcacatgtttctggatatgaagatggaataatatttaaaacaatgattcttccttaattatttaatagagtaattgcttaaataattacaatgtaaaaaaaaaaaaaaaa

SEQ ID NO: 180 - DNA, 302 bp, Homo sapiens
tcatgcattgcaccctagataacatctcatgagccctaaattgggatttgatgcttttctggatcctgggctctacagatggaatcatttatgctgtgacacattttccttctcctactgtgggtctcgggaaatagcccacttcttctgtgagttacytcctactaatcctctcatgcatgaamatcaatatttgaaaggttattttcattgctctatagtaatgcttgtttccctgttgcatcacatgttcctatgctggagttatctggctgtcatcacatggatctggagaggcggcg

SEQ ID NO: 181 - DNA, 1352 bp, Homo sapiens
ggcacgagggcacatgggggtgcgggggtgtaggtgccaagcgccatggcttagacccgagattggagtccggccgccccccgacagcagccgcctcctgccccccgtgcgccctaggcgccaccatgtcgggagacaaacttctgagcgaactcggttataagctgggccgcacaattggagagggcagctactccaaggtgaaggtggccacatccaagaagtacaagggtaccgtggccatcaaggtggtggaccggcggcgagcgcccccggacttcgtcaacaagttcctgccgcgagagctgtccatcctgcggggcgtgcgacacccgcacatcgtgcacgtcttcgagttcatcgaggtgtgcaacgggaaactgtacatcgtgatggaagcggccgccaccgacctgctgcaagccgtgcagcgcaacgggcgcatccccggagttcaggcgcgcgacctctttgcgcagatcgccggcgccgtgcgctacctgcacgatcatcacctggtgcaccgcgacctcaagtgcgaaaacgtgctgctgagcccggacgagcgccgcgtcaagctcaccgacttcggcttcggccgccaggcccatggctacccagacctgagcaccacctactgcggctcagccgcctacgcgtcacccgaggtgctcctgggcatcccctacgaccccaagaagtacgatgtgtggagcatgggcgtcgtgctctacgtcatggtcaccgggtgcatgcccttcgacgactcggacatcgccggcctgccccggcgccagaaacgcggcgtgctctaccccgaaggcctcgagctgtccgagcgctgcaaggccctgatcgccgagctgctgcagttcagcccgtccgccaggccctccgcgggccaggtagcgcgcaactgctggctgcgcgccggggactccggctagaagccgggtggttccagccattcctgcagccaagggcactgggccagggcggcgcacgcgcaagaggcgcgcttcgagggaatatgcgaagctgccgcgtgctgctgcacatgcgctttttcccttccgcttccctccctttcttcccacgggggagtccgcagttgcccttgttcggaatccacgttccccgcgatcccgggagctggaggcgcatgcgcatccgcgattccctgcgaccaggccccgagagggcgagaccagaggggacggaagcattgcgcctgcgcggaactctcagcctctgcgcggagggcgtcccttcccaaccagccgtgggtgccaggttcccggttggaacctgcaataaactcactgttcctcgcaaaaaaaaaaaaaaaaaaa

SEQ ID NO: 182 - DNA, 705 bp, Homo sapiens
  SITE (516): n equals a,t,g, or c
  SITE (598): n equals a,t,g, or c
  SITE (642): n equals a,t,g, or c
  SITE (667): n equals a,t,g, or c
  SITE (681): n equals a,t,g, or c
gatcgccaagccccactccctgcttccctctgagcagcaagacagtggatccacgtgggctgcgcgctcagtgtttgacctcctgagaaaggggcccgtcatggaagtgccctgtgacaagcccttctcggaggagcaagctcgcctctacctgcgggacgtcatcctgggcctcgagtacttgcactgccagaagatcgtccacagggacatcaagccatccaacctgctcctgggggatgatgggcacgtgaagatcgccgactttggcgtcagcaaccagtttgaggggaacgacgctcagctgtccagcacggcgggaaccccagcattcatggcccccgaaggccatttctgattccggccaaagcttcagtggaaaggccttggatgtatggccactgcgtcacgttgtactgctttgtctatgggaagtgcccgttcatcgacgatttcatcctggccctccacaggaagatcaagaatgagcccgtggtgtttcctgaggagccaganatcagcgaggagctcaaggacctgatcctgaagatgttagacaagaatcccgagacgagaattggggtgccagacatcaagntgcacccttgggtgaccaagaacggggaggagccttcttcggangaagacacttgaacctggtgaagtnacagaagaagaagntaagaacttagcaggttcatccca

SEQ ID NO: 183 - DNA, 733 bp, Homo sapiens
  SITE (546): n equals a,t,g, or c
  SITE (580): n equals a,t,g, or c
  SITE (598): n equals a,t,g, or c
  SITE (634): n equals a,t,g, or c
  SITE (656): n equals a,t,g, or c
  SITE (667): n equals a,t,g, or c
gtcttgccctcatctctctgtctctctgtgtctgtgtctcccccgctcattcccatttgcaggtgcaatgtagcaggacaactcatggagcccccccgggcccatcgagtaccggactggctgaccccctagggttggcagtagcccctgaccctcagtatggccaacactaccggagagcctgaggaggtgagcggcgctctgtccccaccgtccgcatcagcttatgtgaagctggtactgctgggactgattatgtgcgtgagcctggcgggtaacgccatcttgtccctgctggtgctcaaggagcgtgccctgcacaaggctccttactacttcctgctggacctgtgcctggccgatggcatacgctctgccgtctgcttcccctttgtgctggcttctgtgcgccacggctcttcatggaccttcagtgcactcagctgcaagattgtggcctttatggccgtgctcttttgcttccatgcggccttcatgctgttctgcatcagcgtcacccgctacatggccatcgcccaccaccgnttctacgccaagcgcatgacactctggacatgcncggctgcatctgcatggnctggaccctgtctgtggccatggcctttccacctgnctttgacgtgggcacctacagnttattcgggangaggaccagtgcatctttgacatcggtactttaaggccaatgacacctgggcttcatgctaagttg

SEQ ID NO: 184 - DNA, 1091 bp, Homo sapiens
  SITE (1): n equals a,t,g, or c
  SITE (2): n equals a,t,g, or c
  SITE (40): n equals a,t,g, or c
nntcttaatagtcctgtcgggtttcgccacctctgacttnagcgtcgatttttgtgatgctcgtcagggggcggagcctatggaaaaacgccagcaacgcggcctttttacggttcctggccttttgctggccttttgctcacatgttctttcctgcgttatcccctgattctgtggataaccgtattaccgcctttgagtgagctgataccgctcgccgcagccgaacgaccgagcgcagcgagtcagtgagcgaggaagcggaagagcgcccaatacgcaaaccgcctctccccgcgcgttggccgattcattaatgcagctggcacgacaggtttcccgactggaaagcgggcagtgagcgcaacgcaattaatgtgagttagctcactcattaggcaccccaggctttacactttatgcttccggctcgtatgttgtgtggaattgtgagcggataacaatttcacacaggaaacagctatgaccatgattacgccagctcgaaattaaccctcactaaagggaacaaaagctggagctccaccgcggtggcggccgctctagaactagtggatcccccgggctgcaggaattcggcacgaggaaataatgttatgctcatgccaactggaataataaagctgattgactttggctgtgccaggcgtttggcctgggcaggtttaaatggcacccacagtgacatgcttaagtccatgcatgggactccatattggatggccccagaagtcatcaatgagtctggctatggacggaaatcagatatctggagcattggttgtactgtgtttgagatggctacagggaagcctccactggcttccatggacaggatggccgccatgttttacatcggagcacaccgagggctgatgcctcctttaccagaccacttctcagaaaatgcagcagactttgtgcgcatgtgcctgaccaggtaagaaactgaaagcaagaggaggaagataaatgcccggagattccaagtggcagacatttccctttcaatttatggcccattaaaagctctgttttggttatgaaaaaaaaaaaaaaaaaaaaaaaaa

SEQ ID NO: 185 - DNA, 2206 bp, Homo sapiens
ccacgcgtccgcttggttttctctcattatgccttttgcaacggttatcttttttgtcatgatcctggatttctacgtggattccatttgttcagtcaaaatggaagtttccaaatgtgctcgttatggatcctttcccatttttattagtgctctcctttttggaaatttttggacacatccaataacagaccagcttcgggctatgaacaaagcagcacaccaggagagcactgaacacgtcctgtctggaggagtggtacgtgagtgctatattcttcattttgtctgccaatatcttatcatctccctctaagagaggacaaaaaggtacccttattggatattctcctgaaggaacacctctttataacttcatgggtgatgcttttcagcatagctctcaatcgatccctaggtttattaaggaatcactaaaacaaattcttgaggagagtgactctaggcagatcttttacttcttgtgcttgaatctgctttttacctttgtggaattattctatggcgtgctgaccaatagtctgggcctgatctcggatggattccacatgctttttgactgctctgctttagtcatgggactttttgctgccctgatgagtaggtggaaagccactcggattttctcctatgggtacggccgaatagaaattctgtctggatttattaatggactttttctaatagtaatagcgttttttgtgtttatggagtcagtggctagattgattgatcctccagaattagacactcacatgttaacaccagtctcagttggagggctgatagtaaaccttattggtatctgtgcctttagccatgcccatagccatgcccatggagcttctcaaggaagctgtcactcatctgatcacagccattcacatcatatgcatggacacagtgaccatgggcatggtcacagccacggatctgcgggtggaggcatgaatgctaacatgaggggtgtatttctacatgttttggcagatactcttggcagcattggtgtgatcgtatccacagttcttatagagcagtttggatggttcatcgctgacccactctgttctctttttattgctatattaatatttctcagtgttgttccactgattaaagatgcctgccaggttctactcctgagattgccaccagaatatgaaaaagaactacatattgctttagaaaagatacagaaaattgaaggattaatatcataccgagaccctcatttttggcgtcattctgctagtattgtggcaggaacaattcatatacaggtgacatctgatgtgctagaacaaagaatagtacagcaggttacaggaatacttaaagatgctggagtaaacaatttaacaattcaagtggaaaaggaggcatactttcaacatatgtctggcctaagtactggatttcatgatgttctggctatgacaaaacaaatggaatccatgaaatactgcaaagatggtacttacatcatgtgagataactcaagaattacccctggagaataaacaatgaagattaaatgactcagtatttgtaatattgccagaaggataaaaattacacattaactgtacagaaacagagttccctactactggatcaaggaatctttcttgagggaaatttaaatacagaatgaaacattaatggtaaaagtggagtaattatttaaattatgtgtataaaaggaatcaaattttgagtaaacatgatgtattacatcatcttcgaaaatagatatgatggattctagtgaagaccaaaattacttctgtttactttctatcaggaagcatctccattgtaaatatgtatttacatgtttattacaaagacccaaatgaaaaatttttagtccattttttgcatagcctaaagataaaataggaataaaagttctatatttatggattttctgtatataaaactggtttctaattataacttaagtcccttaagtaaaatctgtattgccccttttaatgtaaacttaattttttgggagaaacttcaccccctttttttagataagcaatgagaatagggaagtgtttaacctccccgttttttatgtttttcaaaaatcaacccctctataaaataaatttttttttcttttggttaaaaaaaaaaaaaaaaaaaaaaaaaaaaaaaaaaaaaaaaaaaa

SEQ ID NO: 186 - DNA, 2104 bp, Homo sapiens
ggcacgagggacgccccgggcaagagaacgccaggagggataacgggaggaaggccggccggggccgccaaggcagtcccaggctcgcgtaggaggcgcgcagaccttgcaccttgcaccttcgcagcgccctgcaccccgccaccatgtgcgagctgtacagtaagcgggacactctggggctgaggaagaagcacatcgggccctcatgcaaagttttctttgcatcggatcccatcaaaatagtgagagcccagaggcagtacatgtttgatgagaacggtgaacagtacttggactgcatcaacaatgttgcccatgtgggacactgtcacccaggagtggtcaaagctgccctgaaacagatggaactgctaaatacaaattctcgattcctccacgacaacattgttgagtatgccaaacgcctttcagcaactctgccggagaaactctctgtttgttattttacaaattcaggatccgaagccaacgacttagccttacgcctggctcggcagttcagaggccaccaggatgtgatcactcttgaccatgcttaccatggtcacctatcatccttaattgagattagcccatataagtttcagaaaggaaaagatgtcaaaaaagaatttgtacatgtggcaccaactccagatacttacagaggaaaatatagagaagaccatgcagactcagccagtgcttatgcagatgaagtgaagaaaatcattgaagatgctcataacagtggaaggaagattgctgcctttattgctgaatccatgcagagttgtggcggacaaataattcctccagcaggctacttccagaaagtggcagaatatgtacacggtgcagggggtgtgtttatagctgatgaagttcaagtgggctttggcagagttgggaaacatttctggagcttccagatgtatggtgaagactttgttccagacatcgtcacaatgggaaaaccgatgggcaacggccacccggtggcatgtgtggtaacaaccaaagaaattgcagaagccttcagcagctctgggatggaatattttaatacgtatggaggaaatccagtatcttgtgctgttggtttggctgtcctggatataattgaaaatgaagaccttcaaggaaatgccaagagagtagggaattatctcactgagttactgaaaaaacagaaggctaaacacactttgataggagatattaggggcattggcctttttattggaattgatttagtgaaggaccatctgaaaaggacccctgccacagctgaagctcagcacatcatctacaagatgaaagaaaaacgagtgcttctcagtgccgatggacctcatagaaatgtacttaaaataaaaccacctatgtgcttcactgaagaagatgcaaagttcatggtggaccaacttgataggattctaacagttttagaagaagctatgggaaccaaaaccgaaagtgtgacctctgagaatactccatgcaaaacaaagatgctgaaagaagcccacatagaactgcttagggacagcaccactgactccaaagaaaatcccagcagaaagagaaatggaatgtgcacggatacacattcactgctcagtaagaggctcaagacatgactgatttgcattttaaagcaagatgcgatgtccagagttacagagaatgagtagatgtgtctcatcggttaatagctctattatacctctaaaggtggaattgtcagtttagattcataaatgaaaaggtaaatgagtaatcagaataaaccaagtgataatcaaaccatgtcaagattattagttcagactctagcctgttaattttcttagttgatttctgaagctacctgatttattctattaaattgtaagcttgcaaactcaaaataaattggcagatttacctctcatgttttaatgtgtcaaattagagagcaaagtataacaggtgccttcacttttgagacttagtgccttaaaatatgtattctataatgatttcatatataaaagtatatttattgactgtaataaaataaaatatgatgtaaacaaaaaaaaaaaaaaaaactcga

SEQ ID NO: 187 - DNA, 989 bp, Homo sapiens
  SITE (618): n equals a,t,g, or c
ggcacgagctgggccgggccaccactgccctcttgctcagtttccttggccgccgcaccatccaggcgggttcccaggccatggccggcctcgccattctagccaacatgctggtgccgcaagatttgcagaccctgcgtgtggtctttgctgtgctgggaaagggatgttttgggataagcctaacctgcctcaccatctacaaggctgaactctttccaacgccagtgcggatgacagcagatggcattctgcatacagtgggccggctgggggctatgatgggtcccctgatcctgatgagccgccaagccctgcccctgctgcttctctcctctatggcgttatctcattgcttccagcctggttgtgctgttcttcctcccggagacccagggacttccgctccctgacactatccaggacctggagagccagaaatcaacagcagcccaggcaaccggcaagaggccgtaactgtggaaagtacctgctctagaaattgtgcctgcatggagcccctttagtcaaagactcctggaaaggagttgcctcttctccaatcagagcgtggaggcgagttgggcgacttcaagggcctggcatggcagaggccangcagccgtggccgagtggacagcgtggccgtctgctgtggctgaaggcagcttccacgctactcctcttctccctgccctgatcagattccccaccttacccgggccctacaggagcctgtgcagatggccatgcccaaccaataacgagacggttcccctccctttccttgccaggctcatgtctttacaccttcactcagccacgccaaccagagactgggttccaatctcaccccactacatacagagccctcatctgtgaaatgagaatgatcacgtgacccaccccccagggcaggtatcagggtgaactgatcttagcaccggccaaataaatggaacctgctgagagaaaaaaaaaaaaaaaaa

SEQ ID NO: 188 - DNA, 1484 bp, Homo sapiens
  SITE (6): n equals a,t,g, or c
  SITE (9): n equals a,t,g, or c
  SITE (10): n equals a,t,g, or c
  SITE (1410): n equals a,t,g, or c
  SITE (1418): n equals a,t,g, or c
caaagntgnncaggaaaagagggacaagtggctggtgctgtggacagagaagctttatttttagtatgagacaacctctattttctttcaggagagggaagttggattatcaattcttttgtaaatgtgtatggtgatatttgctccgctttttgcaatctttgcatttgcaacatgcggtggctattctggaggcctgcggctgagtgtggactgcgtcaacaagacagaaagtaacctcagcatcgacatagcgtttgcctacccattcaggttgcaccaggtgacgtttgaggtgcccacctgcgagggaaaggaacggcagaagctggcattgattggtgactcctcgtcttcagcagagttcttcgtcactgttgctgtcttcgccttcctctactctttggctgccactgtcgtttacattttcttccagaacaaataccgggaaaacaaccggggcccactcattgacttcattgtcactgtagtcttttcgttcttgtggttggtgggttcatcagcttgggcaaaaggactgtctgacgtcaaagttgcaacggatcccaaggaagtattgctactaatgtcagcttgsaaacaggccatccaacaaatgcatgggctatccacagccctgttatgtcaagcttaaacacttctgtggtctttggattcttgaactttattctctgggctggaaacatatggtttgttttcaaggagaccggctggcattcttcgggacagagatatctttcagatccaatggagaagcactccagcagctataatcaaggtggttacaaccaagacagctatggatcaagcagtgggtacagtcagcaggcgagtttggggccaacctcagatgagtttggccaacagcctactggccccacttcctttaccaatcagatttaacagagtagcatttgcattcttctgcagtsgcctcaccatcttccatttcagtggcagaagaattttttaagggtttcaatcaattattaatgcagagagtattgaatgtaaatcagagctctctagtcttcattaaggcagcaagtcctgggttgtgaaaaatgatacttagagatgaggcgacatgaggagatatattattcatcatagatggctaattggagagtaccttgttatatatacagatactttcatggtcattttgtatgtatgttaaagtagtagaagtattttgtagcttaaagtctctagtatgtaatatggcataaagtaaatcaaatagcgttgagttttcttatgcattttgatgtgaaagatgttataataatttctagaagacaatttggtgtatcacaacatgcatgtcttatttttttttagttttaagtcctataggactatgagtctctaagttaattgtttcanaaaattantccttttttatgtgataaatcatatgattaaagtgcatgaatagcaattcccaaaaaaatggacaa

SEQ ID NO: 189 - DNA, 1079 bp, Homo sapiens
ccacgcgtccggccaaatgctactaaatccagttataatcctggggacgtggtatactttgtttgtcggccaggatacaagcctgttgtaccttctcttcccatgttttccgtttgtcaggataataacatgtggacacctcttcaggaggcttgtacagcaaaacaatgtcagcatccaagagaacccataaatggccagatagtcgctgtaaatggatctttttcctatggttcacagattcactattcttgtaatgagggttatcggcttgttggaaaaagaattctatactgtgaactttctactaatgacgaaaaaaaagtgacttggagtgatgatcccccactatgtataaggataatgtgtccaccacctggaaaaataccaaatggaagatataccggtagtgagaaggatgaatttgaatataatgaagtggtaacttacagttgtaatccttcaaatggaccagatgaatattcacttgttggagagagtaatcttatttgtactggcaatggtgtatggagtagtaaccctcctgagtgtaaagtcgtcaaatgtccatttccaaaccctgaaaatggaagactgttatcaggattcagaaaaaaatactactacaaagcaacagtcacatttgaatgctacccgggttattaccatgagggtgagaacacagcagtctgtggtagtaacagtacttgggagcctgcgaagccaacatgtcttaaagtgctgattccttccagtaccagtcctccgattttgaatcatacagtgtcgactcctcccagtacaaaacctccaattccaagtgtctcagaacccgagtctcctcatacgactatgcctccgagttcaacaactacatctccaggacctcgcccaaaccctgatgatgacccaaaccctgacggccctacgactttagatggaggcatcatcgcggtgatcgttgtttctgttcttgctgttgttgcagtgctcggcggcttcctgtgttatcgacacaagaagaaagggtaaataaaagtgtcttcttctaaaaaaaaaaaaataaaaaaaaaaaaaaa

SEQ ID NO: 190 - DNA, 606 bp, Homo sapiens
  SITE (537): n equals a,t,g, or c
  SITE (558): n equals a,t,g, or c
  SITE (606): n equals a,t,g, or c
gcggacgcgtgggctcttctaatggctatgtaaacatctctgagctccagacctccttcccggtggggactgtgatctcctatcgctgctttcccggatttaaacttgatgggtctgcgtatcttgagtgcttacaaaaccttatctggtcgtccagcccaccccggtgccttgctctggaagtctgtccactacctccaatggtgagtcacggagatttcgtctgccacccgcggccttgtgagcgctacaaccacggaactgtggtggagttttactgcgatcctggctacagcctcaccagcgactacaagtacatcacctgccagtatggagagtggtttccttcttatcaagtctactgcatcaaatcagagcaaacgtggcccagcacccatgagaccctcctgaccacgtggaagattgtggcgttcacggcaaccagtgtgctgctggtgctgctgctcgtcatcctggccaggatgttccagaccaagttaaggcccactttccccccagggggcctccccggagttncagcagtgaccctgactttgnggtggtagacggcgwgcccgyatgcttccgtctatgacgaactgtaan

SEQ ID NO: 191 - DNA, 839 bp, Homo sapiens
tatacgaaagctgagaaattcaaaagctttcaacattcaagattatatcagcaatttaatgaaaataattctattggggagacacaagcccgaaaactttcaaaattgcgagtccatgagtttatttttcacaccaggaagttcattaccagaatatatcccaaagcaacaagagcagactcttctaattttaatccccaagaattttggaatataggttgtcaaatggtggctttaaatttccagacccctggtctgcccatggatctgcaaaatgggaaatttttggataatggtggttctggatatattttgaaaccacatttcttaagagagagtaaatcatactttaacccaagtaacataaaagagggtatgccaattacacttacaataaggctcatcagtggtatccagttgcctcttactcattcatcatctaacaaaggtgattcattagtaattatagaagtttttggtgttccaaatgatcaaatgaagcagcagactcgtgtaattaaaaaaaatgcttttagtccaagatggaatgaaacattcacatttattattcatgtcccagaattggcattgatacgttttgttgttgaaggtcaaggtttaatagcaggaaatgaatttcttgggcaatatactttgccacttctatgcatgaacaaaggttatcgtcgtattcctctgttttccagaatgggtgagagccttgagcctgcttcactgtttgtttatgtttggtacgtcagataacagctaatgataaatgacatatcattagctatgcatcgcaataaaacagccaaaatgaaaaaaaaaaataaaaa

SEQ ID NO: 192 - DNA, 3422 bp, Homo sapiens
gctgggctgaagggagctagaggcaaaatgatatctgctgggcttccaggagagatgggatcccctggggaaccaggacctcctggacgtaagggtgtgaaaggagccaaaggcttggcttcattttctacatgtgagctcattcagtatgtgcgagaccgcagtcctggcaggcatggaaaaccggaatgcccagtgcacccaaccgagttggtgtttgccctggaccactcccgggatgtcactgagcaggaatttgagcggatgaaggagatgatggctttcctggtgagagacattaaggtccgggagaacagctgccccgtgggagcgcacatcgccatcctctcctataactcccacgccaggcaccttgtgcgcttctcagacgcctacaagaagagtcaacttctcagagaaattgaaactattccttatgagagatcctctgccagcagggagattggcagagcaatgcggtttatttccaggaatgtcttcaagcggacgcttccgggggcacacacgagaaaaatcgccacatttttcagcagcggtcagtccgcggatgcccactccatcaccacggctgccatggagttcggcgcgcttgaaatcattcccgtggtgatcactttyagcaacgtgccctyggtcaggcgcgcatttgcgawtgacgacactggcacatttcaagkaatagtggttccctccggggccgactacataccagcattagagagactccagcggtgcactttctgctatgatgtgtgcaagccagatgcttcttgtgaccaagccagaccaccccctgtgcagtcttacatggatgctgctttccttctggatgcctcccggaacatgggaagtgctgaatttgaagacataagagccttccttggagcactattagatcactttgaaatcaccccagagccggagactkskgkcactggagaccgggtggccctattgagccatgctccccccgacttcctacccaacactcagaagagtccagttagagctgagttcaatcttaccacctacagaagtaagcgcctcatgaagaggcatgtgcacgagtcagttaaacaactaaatggagatgcttttattggtcatgccttacagtggactctggacaatgtatttttaagtacacccaatctgagaagaaacaaagtcatatttgtgatatctgctggggaaaccagccacttagatggggaaatcttaaagaaggaatccttgcgagccaaatgtcagggatatgccttatttgtgttttcccttggccctatttgggatgacaaggaactggaggatctcgccagccaccctttggatcaccacctggtccagcttggccgaattcataaacctgaccacagttatggtgtgaagtttgtgaagkcctttataaactcaatcaggcgtgcaatcaacaaatatccaccaataaacttaaaaataaagtgcaacagacttaactctatagatccaaagcagcccccacgaccattccgaagctttgttcctggaccacttaaagctaccctcaaagaagatgtattacagaaggcaaaattctttcaagataaaaaatatctttcaagagtagcaagaagtggcagagatgatgctattcaaaattttatgagaagcacctcccatacctttaagaatggaaggatgatagaaagtgctcccaaacaacatgattaaaaaaatgcttgaacaacttagccttaggaagcatggtaagactctggacttaaatagtaactaaatctgctgccagaactcaagcaacagtttgtaggttatcaggtgacttgaccccctgcattcattggtattaagatatatcttgttcatttatttgaccactcctgacaattccagcactctacgactgatatgtcgaagaactgtttcattagaagacagaagaatgaaagaagtgttttgaaaagtctaatggagatataatttgaaggtaaaatttatatgatgtatgcatatgtgtacatgggtcaatgttaattcttttatctctgtccagttcattttstgyaaacccatyctcctttcctaatttagtaatgtctaatgctcatctatttwgtcaaagttattcttttaatgttttaagctactccaaaatttatcctagaaatggatgctgtttatatgtcgtatttttttaaaacgtgaccttctattccacttaaacacaccactgtgggagttgtttgcttggactgatgagaagagggtaattttctccatctctaaatcctcctgaactcactgaaaaactcattatttctcgcagaacataaattattgcttttgagctggaagttttctcttcattaggaagcttactgccattttgatggagcttgaagcccccattttgatggacttctagtctgtctttcctgttatggtcatttattaattttcactaatccatatattctttagacaaggagagtcaagaaactacttgtcatagatgaagctctgagttacttttacccatcaggtagctgtttagtcaataataaacagcaccaaaacaggattagcagagctcttaaaaacagccttaaatacasastgartttagaaaaatgtaagaaaatcattgttttaatctacaaattcatatgcagttgcagagatgcaaaaragatcagagtaagttaaagtaggaaaggttttataaaagtattgatggctgtgtcctcatctgccatttttgtttttatgatagggctgatattttcaacaacgaaacacccaatgttcagaccttacctcagtctaagagctggctccacagttggtagcaatggccctgttaggcagactgtccccctctttgggaatggaaagaagccctgcctggatgcatggagcagatggatactgacaccaaggacattcagattttctttcctatacctattttcataaaatttggaaagaaaaactatctgcagtatttttttaaaacgacttctgctattcttacttagagaaatccagtgatagcacctcatgtcttcagaggagcaagaagttcaaggagttaaatgtcacattcatactcaggtaatagagaagaataaaacacatcaggtttgcttcatctatcctaagtggtgcttaggggttcagaaaaaatgtttcaagtacaggaaattaatgagcaatatttacratgtattttaataaaagggatttttctagttaactctgagttaagcacgaactcctttcttttgttaattgttggaaataccattaagatgtatttgtctgtttttctgcattggcaagtaaagaacataaaacaaaaaaaaaaaaaaaaaaaaaaaaaaaaaaaaaaaaaaaaaaaaaaa

SEQ ID NO: 193 - DNA, 1189 bp, Homo sapiens
  SITE (1006): n equals a,t,g, or c
  SITE (1108): n equals a,t,g, or c
  SITE (1160): n equals a,t,g, or c
  SITE (1176): n equals a,t,g, or c
  SITE (1182): n equals a,t,g, or c
gcttttgccatcaagttcaccctcattgacagccaagcacagtatccagttgtcaacacaaattatggtaaaatccagggcctaagaacaccattacccagtgagatcttgggtccagtggagcagtacttaggggtcccctatgcctcacccccmactggagagaggcggtttcagccmccagaayccccrtcctcctggactggcatccgaaatrctactcagtttkctgctgtgtgcccccagcacctggatgagagatccttactgcatgacatgctgcccatctggtttaccgccaatttggatactttgatgacctatgttcaagatcaaaatgaagactgcctttacttaaacatctacgtgcccacggaagatgatattcatgatcagaacagtaagaagcccgtcatggtctatatccatgggggatcttacatggagggcaccggcaacatgattgacggcagcattttggcaagctacggaaacgtcatcgtgatcaccattaactaccgtctgggaatactagggtttttaagtaccggtgaccaggcagcaaaaggcaactatgggctcctggatcagattcaagcactgcggtggattgaggagaatgtgggagcctttggcggggaccccaagagagtgaccatctttggctcgggggctggggcctcctgtgtcagcctgttgaccctgtcccactactcagaaggtctcttccagaaggccatcattcagagcggcaccgccctgtccagctgggcagtgaactaccagccggccaagtacactcggatattggcagacaaggtcggctgcaacatgctggacaccacggacatggtagaatgcctgcggaacaagaactacaaggagctcatccagcagaccatcaccccggccacctaccacatagccttcgggccggtgatcgacggcgacgtcatcccagacgacccccagatcctgatggagcaaggcgagttcctcaactacnacatcatgctgggcgtcaaccaaggggaaggcctgaagttcgtggacggcatcgtggataacgaggacggtgtgacgcccaacgactttgacttctccgtgnccaactttggggacaaccttttacgggtacccttgaagggaaagaccttttncgggaaactatcaagntcatgnacccaga

SEQ ID NO: 194 - DNA, 1601 bp, Homo sapiens
cgcccgagcgccggagccccggccccgccccgcgagcgccgagacttgttggccgcggagactgcgaccctcttctctcagtctgccttactaccatgccgctctacgagggcctggggagcggcggggagaagacggcggtcgtgatcgacctgggagaggcctttaccaagtgtggatttgctggagaaactggtccaagatgtataattcctagtgtgataaaaagagctgggatgcctaagcctgtcagagttgttcagtataatatcaatacagaagaattatattcctacctaaaggaattcatccacatactatatttcaggcatctattggtgaatcccagagaccgccgagttgtgattatcgaatcggtattatgtccttctcacttcagagagacactcactcgtgttcttttcaaatattttgaggttccatctgtcttgcttgctccaagtcatctaatggctcttctgacgcttggaattaattctgccatggtcctagattgtggatatagggaaagcctggtgttacccatatatgaaggaatcccagttctaaattgttggggagcactacccctaggaggaaaagctcttcacaaagagttggaaactcaactattggaacaatgtactgttgacacaagtgttgctaaagaacagagccttccctcagtgatgggttcagttccggaaggtgtcttagaggacattaaagcgcgtacttgctttgtaagtgatctgaagcgaggactaaaaatccaagcagcaaaatttaatattgatgggaataatgagcgtccctccccacccccaaatgttgactatccattagatggagagaagattttacatatccttggatcaatcagagattcagttgtggaaattctttttgaacaagataatgaagagcaatcagttgccactttaatattggattcccttatacagtgtccgatagacaccaggaagcaactagcagagaatttggtagtcataggtggcacttctatgttgccaggatttctccacagattgcttgcagaaataggtatttggtagaaaaaccaaaatataaaaaagcacttggcactaagacatttcgaattcatactccacctgcaaaagctaattgtgtggcctggttgggaggggctatttttggagcattacaagatatacttgggagccgttctgtttcaaaggaatattataatcagacgggccgtatacctgattggtgttctctcaataacccacctttggaaatgatgtttgatgtcgggaaaactcaaccacctctgatgaagagagcattttccactgagaaatagaagtttgattaaaaatcaaccttgcttcatatcaaatatttaaccaattataagcaaattgtacaaagtatgtaggatgttttgttatagaggactatagtggaagtgaaagcattctgtgtttactctttgcattaatatataattcttttgactttgtttctcttgtgtagtggtaaaatggtagctggtgcttattgagatttgctgtatttatatcaataaagtatagtaaagcaaaaaaaaaaaaaaa

SEQ ID NO: 195 - DNA, 1417 bp, Homo sapiens
gacgtggtggtattagatcatgcgtatcacggccacctgagctccctgattgacatcagtccctacaagttccgcaacctggatggccagaaggagtgggtccacgtggtatgcactgcccaactcaacaacaggtcggtgcctgtccccaagcccggataacatggcgctgtcactccccacaggcacctctcccagacacctaccggggcccctaccgggaggaccaccccaacccagctatggcctatgccaacgaggtgaaacgtgtggtcagcagtgcacaggagaagggcaggaagattgcagccttcttcgctgagtctctgcccagtgtgggagggcagatcattccccctgctggctacttctcccaagtggcagagcacatccgcaaggccggaggggtctttgttgcagatgagatccaggttggctttggccgggtaggcaagcacttctgggccttccagctccagggaaaagacttcgtccctgacatcgtcaccatgggcaagtccattggcaacggccaccctgttgcctgcgtggccgcaacccagcctgtggcgagggcatttgaagccaccggcgttgagtacttcaacacgtttgggggcagcccagtgtcctgcgctgtggggctggccgtcctgaatgtcttggagaaggagcagctccaggatcatgccaccagtgtaggcagcttcctgatgcagctcctcgggcagcaaaaaatcaaacatcccatcgtcggggatgtcaggggtgttgggctcttcattggtgtggatctgatcaaagatgaggccacaaggacaccagcaactgaagaggctgcctacttggtatcaaggctgaaggagaactacgttttgctgagcactgatggccctgggaggaacatyctgaagtttaagcccccaatgtgcttcagcctggacaatgcacggcaggtggtggcaaagctggatgccattctgactgacatggaagagaaggtgagaagttgtgaaacgctgaggctccagccctaagccagccctgctctgcctaagtgtactccagaagaaactcatctcatccaaatacacgctattgagaaggcgagcctgacctccctcttacagataaagtcagctttcagaggctcagggtgggggggcctgcccgaggccataatgctacccaccccctcctcctaaccactggtctgttggaataacccagatgtctgcatcccctcaagtcagtcaatttcctttctgtccactgggggtggaatggggtagggtgggatactttaaagtgctcctgcttaaataaattagaccagaccagtgtatttctaaagaaaatcctgacatgcacacccattaaaaatagtacattttaaaaaaaaaaaaaaaaaaaaaaa

SEQ ID NO: 196 - DNA, 341 bp, Homo sapiens
  SITE (20): n equals a,t,g, or c
  SITE (338): n equals a,t,g, or c
ggggttggcgtgatgtgtanttcttcgcccagtcggctgaaaacgccacgctgaaggatgttgagggcaacgagtacatcgatttcgccgcagatttgcggtgctgaataccggacatcgccaccctgatctggtcgcggcggtggagcagcaactgcaacagtttacccacaccgcgtatcagattgtgccgtatgaaagctacgtcaccctggcggagaaaatcaacgcccttgccccggtgagcgggcargccaaaamcgcgtttcttcamcaccgtgcggaarcggtggaaaaacgcggtgaaaattggttcgcgcccataaccggaacgcccnggg

SEQ ID NO: 197 - DNA, 762 bp, Homo sapiens
  SITE (741): n equals a,t,g, or c
  SITE (744): n equals a,t,g, or c
  SITE (748): n equals a,t,g, or c
agctggagctccaccgcggtggcggccgctctagaactagtggatcccccgggctgcaggaattcggcacgagctggaaatccacaaggaacatctttctcctgtggtgacggcatatttccagaaacccctgctgctccaccaggggcacatggagtggctctttgatgctgaaggaaacagatacctggatttcttttccgggattgttactgtcagtgttggccactgccacccaaaggtgaatgcagtggcacaaaagcagctcsgccgcctgtggcatacaagcaccatcttcttccaccctccaatgcatgaatatgcagagaagcttgccgcacttcttcctgagcctcttaaggtcattttcttggtgaacagtggctcagaagccaatgagctggccatgctgatggcagggcgcactcaaacaacatagacatcatttctttcagaggagcctaccatggatgcagtccttacacacttggcttgacaaacgtagggayctacaagatggaactccctggtgggacaggttgccaaccaacaatgtgtccagatgtttttcgtggcccttggggaaggaagccactgtcgagawtctccagtgcaaacaatcaggaagtkcaacttgkcaccaaactkgytggccaactwaaagatcagtatatttgagcaattcaaagatacscttgagcacatytgkggccaagtcaaattgctggaatttttcgcaanaanctantcaagggggtgaaa

SEQ ID NO: 198 - DNA, 2688 bp, Homo sapiens
  SITE (2688): n equals a,t,g, or c
ttcatgatttcccagcagagcaagttgatgatttgaacctcacttctggagaaattgtttatcttctggagaagatagatacagattggtacagagggaactgtagaaaccagattggcatatttcctgccaactatgtcaaagtgattattgatatcccagaaggaggaaatgggaaaagagaatgtgtttcatctcattgtgttaaaggctcaagatgtgttgctcggtttgaatatattggagagcagaaggatgagttgagtttctcagagggagaaattattattcttaaagagtatgtgaatgaggaatgggccagaggagaagttcgaggcagaactgggattttccccctgaactttgtggagcctgttgaggattatcccacctctggtgcaaatgttttaagcacaaaggtaccactgaaaaccaaaraagaagattctggctcaaactctcaggttaacagtcttccggcagaatggtgtgaagctcttcacagttttacagcagagaccagtgatgacttatcattcamgaggggagaccggatccagattctggaacgtctggattctgactggtgcaggggcagactgcaggacagggaggggatcttcccagcagtgtttgtgaggccctgcccagctgaggcaaaaagtatgttggccatagtaccgaaggggaggaaggccaaagccttatatgatttccgaggggagaatgaagatgaactttccttcaaggctggagatataataacagagctggaatctgtagatgatgactggatgagtggagaacttatgggaaaatctggaatatttcccaaaaactacatacagtttctacagatcagctagaggagaagcttgtctgtgttccttggcacaagaactcacttgaactatcaccttgactatcagatatgtttttgcactattttttttaactgaaaaagaaatatctaagctgtacatggtacactagaattttctgaaagcagaaaacgttcagattttgtagttaattttcattacaatagaaacatgcacatggaaacccatgagctaggattctaccgaggaaaacatctagtgggattagcaaggtgaagggaaagcatctggtggcatggcagcatggggaggctcacacacagaagttgcacgtggacatctgttttaatcagcacaagtgaattaaccatgcttcttcatttttttactttagttaaaaaagaggacatttaatattctacatgctgtaactatcaggacatggttagcaatctcaatttcatttttgatattcaaattaattcttacagcttgagcatatcagccttattaccagagcaaatccttccttcagatgggatagtttactgactagttggagcatttgtaagcacatggtgaaatcagcccctgcccaccaaaataatctttatgttaccaagtgattcccatttgtctaaggatttgaagggggtctaaattggatgtatcttagtctaaagaaccaaaaccatccctgaaatgccttgctaatacaactaatccttccatatatgtgccatacttatttttttcctcagtgtatactttatgttaacagggttattacaaagcacattttctgaatctgcaatcattcctttgacaattactggacccaaaggaaaattcattttctttgcattattccagtaatatataaaaactgtgtcttgttatagtagtacattatgaatcacatataaaatcttacaatacagaacaactgttaagatggaaaacagtgccaaacctccacagctcatttctttgtaatataatcagaatgaaaaataatttaagaggacagaagactggtacttttttgttttattttttctctagcttatccctgcacaattattagagtgaatgaaaaaccactttcctgctttccattgttataaattctaagcttaagataaaagtggttctttacatgactgaatcaattacaatttatgggctagagccaaataggttgaagacaatcatccaaacagatcaatggaatagaatttcattggaaatgtaaaacactttcccaacaatggtcatgactttcttctgtttttgagaagagtttcatatgctggaccacattttagcttttattgttttttttttcccattgtccaaaaagttaagcaacaagtggccacacttttacgtgactacaacctggagttctgcaaagaaggtaatatttacttggtctttgactaaagttatctccccattctatggttacattttattttggactatggggacttctaatacgttttggtaaagaagagagtataaagaaaattcttgtcaaatttcactcaaaagtaatttcatgagaaatcaatgatttaaagcattatccaaattaaattatcatttgcagcaaactgtacaacagcaggaaggatatggaatggaacatgaggtatatatctttgcctttataattttaacatcttatattgaagattctgaaaacctatctttattagaggaaaatctcaatcttcagttttggccttctgtcaccagaatgataagtgcaatagttgtaaatctacttgacactgtaataaactgaactgaactttcaaaaaaaaaaaaaaaaaaaccn

SEQ ID NO: 199 - DNA, 1474 bp, Homo sapiens
ccttttttttttttttttttttttttgtcatccttctaaacatttaattcagcaattcctacattgtcatgacaaaaatgaaacttgctgagggttacagagttctaatcagaaataacaacttaaaaatctcacaaaagctctacgtaagcctgtcgtaagggctgcactgtattccgaacatttattttgaaaacaattgtcaaaatgtaaaatctccagcaccctcaacatgatgtagccttttggctcattctatacgtttgtgatcatctttgtaactccaagttttggaatatgaaaaagcatgatggcaaagaataataacaagacatttgtttctccatgccctgcccaagacttgatgcaccgtgcgtgccccattaagcggtggggtggtccaacacgtcagttagtaaagcagcacttgctggtgctctgcctgctctgaattcagttccgaggctgtgagttgaactctgtacaaatgttctggatgatcctggggacatactgatggaggttgtcaaactcgtccacaaagaaggagtggtctctggcggggtgagtggcaatgacttctagctcctcttgggcagcccaggcaacgcctatcgcataggtgatcactcccttcagatgggcaccatggctgggatccggacgtcgtcgtaggacctcccgtcggtgatgaggatcattaacttcctcttgttgggcttggacttcttgaagagctgctccagggcgaagttgatggcagcccccgtgctggtgccaccactccagtagcccaccctcttgatggcgttgaggatgtcaggcttgctgctgtacttgtcgaacccaaactccagccgctgttcgtaggtgtactgcacggccccgatgcgcgtgtccgtgtcggaaatctcaaactctttggtgaggttggtcacaaaytgragacggtcgaaagttgcccgtccccacactgctgaagccgtcgatgacgaagccaatgtcagccgagttcaagcaggtcttgctgcaggccaggcggtcagtgtcgcagacccgcttcaccagaggctgcagggtcttgtggaggccaaaccagctctgcacgtggagcgagtagaagccgtttgttctgcacacggccttgtttgcaaagttgggctccaccacatactgcttctcattttcagcagcaccttcaatggtgatgaagaaaatgttgattcctgactctctcgcaagtcttgaagcctcctccactttgtccgtgggccagccatccaccatcaccaccaccacattgggagccccgcttctgtttccattggctttggaaaagaagttcttggtcacaaaggagatggcccgacctacattagaaagtcctcctctctgagtaattttctctatggctgtcttcagatctcgagaattcgtgtgtgtcttgaggttaaagtgagtagcagctcgtgcc

SEQ ID NO: 200 - DNA, 821 bp, Homo sapiens
  SITE (58): n equals a,t,g, or c
  SITE (109): n equals a,t,g, or c
  SITE (325): n equals a,t,g, or c
  SITE (765): n equals a,t,g, or c
  SITE (769): n equals a,t,g, or c
  SITE (773): n equals a,t,g, or c
  SITE (808): n equals a,t,g, or c
caattatgtcacaccacagaagtaaggttccttcacaaagatcccaagctagcagatntcccagtcacgaacgttgtaaaacgacgggccagtgcctagcttataatangactcactatagggagagagctatgacgtcgcatgcacgcgtaarcttgggcccctcgagggatcctactagagcggccgccctttttttttttttttgagtttcagaataatgcagatgttttatttgaggggaaagcatcattcatatgtatccaagcaaaaggcagagcagttttacctttaaatgctaaaagtactggttggctctgtaggnccctcagaatcaaaaggaaactcctccacactttgtctctgtcttctccaggacccatatttcttggccactttcataacgtagtttttgaaagatgctcccataaaaacataaaggattgggttgaggcagctgtgaaagagtgcgatgctttctgtgacttggatggcgatgtccatgcgtttgctcatgttgcagctggtgatcagggagtagatgatgtctatggctcggcagaacttgacaatgttataaggcagttgagtgacaatgaaaactataacgactgtgagcagaacttttaggggkcgagatattttaatgtttggcatcttcatgagtgtcctttctgtgataaagtagcacacccccataataagaaaggggactacaaatccaatgcagatctctagcattgaatcaatgctttcattgatgtnccangtancgggggaaatgggatgacctagcattgtcattacnggataaaaccact

SEQ ID NO: 201 - DNA, 476 bp, Homo sapiens
ggcgctgcccagtattcaccagaagcactcgcgtcaattcagaaccatgtccgaaagcgagaagcgcctgctccagaagcagaaagcaagcaaactgaaaaggatccaggcgtgcaggaattggaagcattaatagacacaattcagaagcaactgaaagatcactcatgcaaagacaacattcgtgaggcatttcaaatttatgacaaggaagcttcaggatatgtggacagagacatgttctttaaaatctgtgaatcgcttaacgtcccagtggatgactccttggttaaggagttaatcaggatgtgctctcatggagaaggcaaaattaactactataactttgttcgtgctttctcaaactgacctgctgatgagaaaatgcaagacaatttttgatactggaactatgctttgaaatacaccttacactcttcatagaggcaaaaaaaaaaaaaaaaaaaaaaaaaaaa

SEQ ID NO: 202 - DNA, 1339 bp, Homo sapiens
ggatgatacagacagcatgtatggtgaatgtcggacctacatcattcattactatcttatggatgatacggtggaaattcgagaggtccacgaacggaatgatgggagagatcctttcccactcctaatgaaccgccagcgtgtgcccaaagttttggtggaaaatgcaaagaacttccctcagtgtgtgctagaaatctctgaccaagaagtgttggaatggtatactgctaaagacttcattgttgggaagtcactcactatccttgggagaactttcttcatttatgattgtgatccatttactcgacggtattacaaagagaagtttggaatcactgatttaccacgtattgatgtgagcaagcgggaaccacctccagtaaaacaggagttgcctccttataacggttttggactagtggaagattctgctcagaattgttttgctctcattccaaaagctccaaaaaaagacgttattaaaatgctggtgaatgataacaaggtgcttcgttatttggctgtactgctaccgacatgatcagtatctttgagcctcctgttcgcaattctggtatcattgggggcaagtaccttggcaggactaaagttgttaaaccatactctacagtggacaaccctgtctactatggccccagtgacttcttcattggtgctgtgattgaagtgtttggtcaccggttcatcatccttgatacagacgagtatgttttgaaatacatggagagcaacgctgcccagtattcaccagaagcactcgcgtcaattcagaaccatgtccgaaagcgagaagcgcctgctccagaagcagaaagtctatcatgaacccttgtgaaatgaaatatttgaagacacagatatgaagggaccaaggaaaagctttgttcctaccccatctttcatgtacccacttcttaccctccactccccatagcaagcaaactgaaaaggatccaggcgtgcaggaattggaagcattaatagacacaattcagaagcaactgaaagatcactcatgcaaagacaacattcgtgaggcatttcaaatttatgacaaggaagcttcaggatatgtggacagagacatgttctttaaaatctgtgaatcgcttaacgtcccagtggatgactccttggttaaggagttaatcaggatgtgctctcatggagaaggcaaaattaactattataactttgttcgtgctttctcaaactgacctgctgatgagaaaatgcaagacaatttttgatactggaactatgctttgaaatacaccttacactcttcatagaggcaaaaaaaaaaaaaaaaaaa

SEQ ID NO: 203 - DNA, 955 bp, Homo sapiens
ggcagaactgtctgggacagacgctgcccggatccctgcggctgcctgcactctggaccacgagctctgagagcagcaggttgagggccggtgggcagcagctcggaggctccgcgaggtgcaggagacgcaggcatggccggtgagctgactcctgaggaggaggcccagtacaaaaaggctttctccgcggttgacacggatggaaacggcaccatcaatgcccaggagctgggcgcggcgctgaaggccacgggcaagaacctctcggaggcccagctaaggaaactcatctccgaggttgacagcgacggcgacggcgaaatcagcttccaggagttcctgacggcggcgaagaaggccagggccggcctggaggacctgcaggtcgccttccgcgccttcgaccaggatggcgacggccacatcaccgtggacgagctcaggcgggccatggcggggctggggcagccgctgccgcaggaggagctggacgccatgatccgcgaggccgacgtggaccaggacgggcgggtgaactacgaggagttcgcgaggatgctcgcccaggagtgaggctccccgcctgtgtccccctggctgcgctctgagccttcagggccaccgcccgctgctgcttttgtgctgggactctccggggaaacctggtcggtggatgggaaactgcctccccctgggaggaaggctttgcgctccggggcctggatgcggcgccctcgggccgcctgcgagcccctctctgcctccagaccttgggcagaaggaggcctccttgggcctggtccccctttgccctgcagtggaatgagggcccctcagccccgcattgatctaaataaaggactgccgagttccaaaaaaaaaaaaaaaaaaaaaaaaaaaaaaaaaaaaaaaaaaaaaaaaaaaaaaaaaaaaaaaaaaaaaaaaaaaaaaa

SEQ ID NO: 204 - DNA, 1887 bp, Homo sapiens
aaagatggcggcggctgcgggtagctgcgcgcgggtggcggcctggggcggaaaactgcgacgggggctcgctgtcagccgacaggctgtgcggagtcccagccccttggcagcggcagtggccggcgcggccctggcaggagcaggagcggcctggcaccacagccgcgtcagtgttgcggcgcgggatggcagttttacagtctccgcacagaaaaatgttgaacatggaataatatatattgggaaaccgtctcttcgtaagcagcgcttcatgcagttttcttcactcgaacatgaaggagaatattatatgacaccacgagacttcctcttctcagtgatgtttgagcaaatggaacgtaaaacttcagtcaagaagctgacaaaaaaggacatcgaggatacactgtcagggatccaaacagctggctgtggatcaacttttttcagagaccttggcgataaagggctaatttcatataccgagtatcttttcttgcttacaatcctcactaaaccccattctggatttcatgttgcttttaaaatgctggatacagatggtaatgagatgattgaaaaaagggaattttttaagctgcagaagatcataagtaaacaagatgacttgatgacagtgaaaactaatgaaactggatatcaggaagcaatagtgaaagaacctgaaattaacacaactcttcagatgcgtttctttggaaaaagaggacaaagaaaacttcattataaagaatttcgaagatttatggaaaatttacaaacagagattcaagaaatggaattccttcagttttctaaaggtttgagtttcatgagaaaagaagactttgcagagtggctactttttttcactaacactgaaaataaagatatttattggaaaaatgtgagagagaagttgtcagcaggagagagcattagtttggatgaattcaagtcattttgccattttacaacccacttggaagactttgctattgccatgcagatgttcagtttagctcatcgtcctgtcagactagcggagtttaagagagctgtgaaagtagcaacaggacaagaactctcaaacaatattttggacactgtctttaagatctttgatttggatggtgatgaatgtcttagtcatgaagagtttcttggggtgttaaaaaacagaatgcatcgaggtttatgggtaccacaacatcagagtatacaagaatactggaagtgtgtgaagaaagaaagcattaaaggagtaaaagaagtctggaaacaagctggaaaaggtcttttttaataaaagatataatagtatggcaattatattgttccaaatgtcaaaatttgtgattttttagaagtacttgctatttatcttcttaagtcttcattgatattctgtgtgaaataagcatgtcttgtacttgctttctgattcataattttatgaaagaacttagtagaaagaaaagtaagtataaaaatagatattggattctgtcagaaggcctagatttgaaataatgttttgtacttcggtaagatggaaaacttagtgattcactgatttcttagacactctaatatgatatgctttctggaaggataaaacaaatacatatgggaaaaagtacttgagaccaaggccagcatcaattccagacatcttcatgttcctaataggctaaatgaagttaaaaacttatttcagatttttctcatctgtaccttatatctcataaatttattgcatattttatgtcagtagcttagctgtttattgtctttaaaataacatgtaaacttcaatgttctatctggaagcagaataaaatatttacatagatacaaaaaaaaaaaaaaaaaaaaaaaaaa

SEQ ID NO: 205 - DNA, 1399 bp, Homo sapiens
  SITE (1203): n equals a,t,g, or c
  SITE (1265): n equals a,t,g, or c
  SITE (1336): n equals a,t,g, or c
  SITE (1346): n equals a,t,g, or c
  SITE (1378): n equals a,t,g, or c
gttcatggcatacggttctgcaaaagatctcatctgtacacacttcatggatggcatgaatgagctggcgattgcttacatcctgcagggggtgctgaaggccctcgactacatccaccacatgggatatgtacacaggagtgtcaaagccagccacatcctgatctctgtggatgggaaggtctacctgtctggtttgcgcagcaacctcagcatgataagccatgggcagcggcagcgagtggtccacgattttcccaagtacagtgtcaaggttctgccgtggctcagccccgaggtcctccagcagaatctccagggttatgatgccaagtctgacatctacagtgtgggaatcacagcctgtgaactggccaacggccatgtcccctttaaggatatgcctgccacccagatgctgctagagaaactgaacggcacagtgccctgcctgttggataccagcaccatccccgctgaggagctgaccatgagcccttcgcgctcagtggccaactctggcctgagtgacagcctgaccaccagcaccccccggccctccaacggtgactcgccctcccacccctaccaccgaaccttctccccccacttccaccactttgtggagcagtgccttcagcgcaacccggatgccaggcccagtgccagcaccctcctgaaccactctttcttcaagcagatcaagcgacgtgcctcagaggctttgcccgaattgcttcgtcctgtcacccccatcaccaattttgagggcagccagtctcaggaccacagtggaatctttggcctggtaacaaacctggaagagctggaggtggacgattgggagttctgagcctctgcaaactgtgcgcattctccagccagggatgcagaggccacccagaggcccttcctgagggccggccacattcccgccctcctgggsagattgggtagaaaggacattcttccaggaaagttgaytgctgactgattgggaaagaaaatcctggagagacacttcactgctccaaggcttttgagacacaagggaatctcaacaaccagggatcaggagggtccaaagccgacattcccagtcctgtgagctcaggtgacctcctccgcagaagagagatgctgctctggccctgggagctgaattccaagcccagggtttggctccttaaacccgaggaccgncacctcttcccagtgcttgcgaccagcctcattctatttaactttgctctcagatgcctcanatgctataggtcagtgaaagggcaagtaagtaagctggctggcttccttccttagaactcttccttataanttcagagaanggcatttctggcttttttaagcacagactaangcttggaacaagccatcctta

SEQ ID NO: 206 - DNA, 2119 bp, Homo sapiens
cccccgggctgcaggaattcggcacgagtttaaaagaggtaagagcaacgtgctttgggagcagagaagagggagaaagcagcatcttgcctggatgagccaggggacacagaagagaagcccactatctcatttaatctttacaactctcttgcaaggttccctggttgtgaaaatacatgagataaatcatgaaggccactatcatcctccttctgcttgcacaagtttcctgggctggaccgtttcaacagagaggcttatttgactttatgctagaagatgaggcttctgggataggcccagaagttcctgatgaccgcgacttcgagccctccctaggcccagtgtgccccttccgctgtcaatgccatcttcgagtggtccagtgttctgatttgggtctggacaaagtgccaaaggatcttccccctgacacaactctgctagacctgcaaaacaacaaaataaccgaaatcaaagatggagactttaagaacctgaagaaccttcacgcattgattcttgtcaacaataaaattagcaaagttagtcctggagcatttacacctttggtgaagttggaacgactttatctgtccaagaatcagctgaaggaattgccagaaaaaatgcccaaaactcttcaggagctgcgtgcccatgagaatgagatcaccaaagtgcgaaaagttactttcaatggactgaaccagatgattgtcatagaactgggcaccaatccgctgaagagctcaggaattgaaaatggggctttccagggaatgaagaagctctcctacatccgcattgctgataccaatatcaccagcattcctcaaggtcttcctccttcccttacggaattacatcttgatggcaacaaaatcagcagagttgatgcagctagcctgaaaggactgaataatttggctaagttgggattgagtttcaacagcatctctgctgttgacaatggctctctggccaacacgcctcatctgagggagcttcacttggacaacaacaagcttaccagagtacctggtgggctggcagagcataagtacatccaggttgtctaccttcataacaacaatatctctgtagttggatcaagtgacttctgcccacctggacacaacaccaaaaaggcttcttattcgggtgtgagtcttttcagcaacccggtccagtactgggagatacagccatccaccttcagatgtgtctacgtgcgctctgccattcaactcggaaactataagtaattctcaagaaagccctcatttttataacctggcaaaatcttgttaatgtcattgctaaaaaataaataaaagctagatactggaaacctaactgcaatgtggatgttttacccacatgacttattatgcataaagccaaatttccagtttaagtaattgcctacaataaaaagaaattttgcctgccattttcagaatcatcttttgaagctttctgttgatgttaactgagctactagagatattcttatttcactaaatgtaaaatttggagtaaatatatatgtcaatatttagtaaagcttttcttttttaatttccaggaaaaaataaaaagagtatgagtcttctgtaattcattgagcagttagctcatttgagataaagtcaaatgccaaacactagctctgtattaatccccatcattactggtaaagcctcatttgaatgtgtgaattcaatacaggctatgtaaaatttttactaatgtcattattttgaaaaaataaatttaaaaatacattcaaaattactattgtatacaagcttaattgttaatattccctaaacacaattttatgaagggagaagacattggtttgttgacaataacagtacatcttttcaagttctcagctatttcttctacctctccctatcttacatttgagtatggtaacttatgtcatctatgttgaatgtaagcttataaagcacaaagcatacatttcctgactggtctagagaactgatgtttcaatttacccctctgctaaataaatattaaaactataaaaaaaaaaaaaaaaaaaaaaaaaccacgagggggggcccggtacccaattcgc

SEQ ID NO: 207 - DNA, 2124 bp, Homo sapiens
tccatgctgaagaggctggctcgagaccagctcatctatctgctggagcagcttcctggaaaaaaggatttattcattgaggcagatctcatgagccctttggatagaattgccaatgtctccatcctgaagcaacacgaagtagacaagctatacaaggtggagaacaagccagccctcagctccaatgaacaattgtgcttcttggtcagaccccgcatcaagaatatgcgatacattgccagtcttgtcaatgctgacaaattggctggccgaactcgcaaatacaaagtgatcttcagccctcaaaagttctatgcgtgtgagatggtgcttgaggaagagggaatctatggagatgtgagctgtgatgaatgggccttctctttgctgcctcttgatgtggatctgctgagcatggaactaccagaatttttcagggattactttctggaaggagatcagcgttggatcaacactgtagctcaggccttacaccttctcagcactctctatggaccctttccaaactgctatggaattggcaggtgcgccaagatggcatatgaattgtggaggaacctggaggaggaggaggatggcgaaaccaagggccgaaggccagagattggacatatctttctcttggacagagatgtggactttgtgacagcactttgctcccaagtggtttatgagggcctagtagatgacaccttccgcatcaagtgtgggagtgtcgactttggcccagaagtcacatcctctgacaagagcctgaaggtgctactcaatgccgaggacaaggtgtttaatgagattcggaacgagcacttctccaatgtctttggcttcttgagccagaaggcccggaacttgcaggcccagtatgatcgccggagaggcatggacattaagcagatgaagaatttcgtgtcccaggagctcaagggcctgaaacaggagcaccgcctgctgagtctccatattggggcctgtgaatccatcatgaagaagaaaaccaagcaggatttccaggagctaatcaagactgagcatgcactgctagaggggttcaacatccgggagagcaccagctacattgaggaacacatagaccggcaggtgtcgcctatagaaagcctgcgcctcatgtgccttttgtccatcactgagaatggtttgatccccaaggattaccgatctctgaaaacacagtatctgcagagctatggccctgagcacctgctaaccttctccaatctgcgaagagctgggctcctaacggagcaggcccccggggacaccctcacagccgtggagagtaaagtgagcaagctggtgaccgacaaggctgcaggaaagattactgatgccttcagttctctggccaagaggagcaattttcgtgccatcagcaaaaagctgaatttgatcccacgtgtggacggcgagtatgatctgaaagtgccccgagacatggcttacgtcttcagtggtgcttatgtgcccctgagctgccgaatcattgagcaggtgctagagcggcgaagctggcagggccttgatgaggtggtacggctgctcaactgcagtgactttgcattcacagatatgactaaggaagacaaggcttccagtgagtccctgcgcctcatcttggtggtgttcttgggtggttgtacattctctgagatctcagccctccggttcctgggcagagagaaaggctacaggttcattttcctgacgacagcagtcacaaacagcgctcgccttatggaggccatgagtgaggtgaaagcctgatgtttttcccggccagtgttgacatcttccctgaacacattcctcagtgagatgcaggcatctggcacccagctgctataaccaagtgtccaccaactacctgctaagagccgggagcatggaacgtgttgggatttagagaacattatctgagaaaagagttcacttcctgctcccaggatatttctcttttctgtttatgaagtacaacccatgctgctaagatgcgagcaggaagaggcatcctttgctaaatcctgtttgaatgtcattgtaaataaagcctctgctctcagatgtaaaaaaaaaaaaaaa

SEQ ID NO: 208 - DNA, 737 bp, Homo sapiens
  SITE (1): n equals a,t,g, or c
  SITE (4): n equals a,t,g, or c
  SITE (5): n equals a,t,g, or c
  SITE (6): n equals a,t,g, or c
nttnnnatgmatcgccggctcgaaataaccctactaaagggaacaaaagctggagctccaccgcggtggcggccgctctagaactagtggatcccccgggctgcaggaattcggcacgagcaactcatggagcccccccgggcccatcgagtaccggactggctgaccccctagggttggcagtagcccctgaccctcagtatggccaacactaccggagagcctgaggaggtgagcggcgctctgtccccaccgtccgcatcagcttatgtgaagctggtactgctgggactgattatgtgcgtgagcctggcgggtaacgccatcttgtccctgctggtgctcaaggagcgtgccctgcacaaggctccttactacttcctgctggacctgtgcctggccgatggcatacgctctgccgtctgcttcccctttgtgctggcttctgtgcgccacggctcttcatggaccttcagtgcactcagctgcaagattgtggcctttatggccgtgctcttttgcttccatgcggccttcatgctgttctgcatcagcgtcacccgctacatggccatcgcccaccaccgcttctacgccaagcgcatgacactctggacatgcgcggctgtcatctgcatggcctggaccctgtctgtggccatggccttcccacctgtctttgacgtgggcacctycaagtttattcgggaggaggacaagtgcatctttgagcatcc

SEQ ID NO: 209 - DNA, 1378 bp, Homo sapiens
tcgacccacgcgtccgcgctcgccccgagagagacccggccatgcaggagccgctgctgggagccgagggcccggactacgacaccttccccgagaagccgcccccgtcgccaggggacagggcgcgggtcgggaccctgcagaacaaaagggtgttcctggccaccttcgccgcagtgctcggcaatttcagctttgggtatgccctggtctacacatcccctgtcatcccagccctggagcgctccttggatcctgacctgcatctgaccaaatcccaggcatcctggtttgggtccgtgttcaccctgggagcagcggccggaggcctgagtgccatgatcctcaacgacctcctgggccggaagctgagcatcatgttctcagctgtgccgtcggcggccggctatgcgctcatggcgggtgcgcacggcctctggatgctgctgctcggaaggacgctgacgggcttcgccggggggctcacagctgcctgcatcccggggctgactctcccatctcggccgggcctaggaaccagtattttcagcaaaacctggtgcggcggctgtgtcttgcaggtgcctcctgctgccgtggcgctggctggctgtggccggggaggcgcctgtgctcatcatgatcctgctgctcagcttcatgcccaactcgccgcgcttcctgctctctcggggcagggacgaagaggccctgcgggcgctggcctgcctgcgtgggacggacgtcgatgtccactgggagttcgagcagatccaggacaacgtccggagacagagcagccgagtatcgtgggctgaggcacgggccccacacgtgtgccggcccatcaccgtggccttgctgatgcgcctcctgcagcagctgacgggcatcacgcccatcctggtctacctgcagtccatcttcgacagcaccgctgtcctgctggtgagagcccagccccggccggcgcccacccacggggtcccctggaggctggcagggcaggggaggcagggcctgctcctgcacttacccaacccctggtcttacccacacctgctctgtgccgggtgtcagggatgccacagcaagatctgagatctggccttgtggagacagttccagtgccttcacctgttctcagaatgtttttaagataagcttaagtgttttaaaataaaatactggcaaaatcccaacacgaggccaaggcgggaggatcacttaagcccaggagtgtgagactgcagtggccacgatctcaccactgcgctccatcctggtgacagagcaggaccctgtctctaaaaacatatagaaattttaaaaattaaataaaatacatgggattacaaaggaaaaaaaaaaaaaaaaa

SEQ ID NO: 210 - DNA, 1128 bp, Homo sapiens
  SITE (24): n equals a,t,g, or c
ctcttcgctattacgccagcttgncgaaaggggatgtctgcaaggcgattaagttgggtaacgccagggttttcccagtcacgacgttgtaaaacgacggccagtgaattgtaatacgactcactatagggcgaattgggtaccggsccgcctaagcccagaccctgaccaaatcgagccagcgccagcagcagcggggcgaaaataccaatcgtggcatagcccggcagcagaccaatcaccacggtcgaaatccccatcgttagcaacgaggcgaccagcgtcgctttacgcccaacgcgatcgccaaaatgaccaaaaacggcagagccaatggggcgcgcgacgaaggcgatggcgaaggtggcgagcgactgtagcgttgctgccgtaggatcgccctgcgggaagaagatatgcggaaacacaataacggccgcagtggcgtaaatgtaaaagtcgaagaactcaatggctgtgccaatgagagaggcgacaaggactttattacgcgagttgatcggcgtgtattcttgctcgtggtcgagtgttgtggctgttgcttgcataatcttttcttattttttggctaacgaatagccatattacgcacagcaaaagtgatatttcaatgtgtaacaaatcgcggaaatggtcaaaaatcaggcaaaaaggggataatgtttaggccagtgatttttcttctatgaaatgcttcacataattttataaatagtggataaaactggtttcaggttaaataaaagttaccaactggatttatatgctggggttatgagttggaatgaaattgtttgctcccaaatagatggctgaagaggctctggggacgagtttcaagaggttatgtgcgcattatagccggatgcgatgctggcgcatcttatccggcctacggggagccaggccgaataaaatcgtatgccggataaggcgtttacgccgcatccggcctattttaaggctgcgttttccccggcattcgcgggtcgtctttatattcggcggtggcaatccacgccgcgcaaaacagcgtcaaacgggcgaagaagtagaaaaatgccatcagccccagcacggaaccaaatgctgcgccagagggggatt

SEQ ID NO: 211 - DNA, 1611 bp, Homo sapiens
ggcacgaggccccgcgagcgccgggacttgttggccgcggagactgcgaccctcttctctcagtctgccttactaccatgccgctctacgagggcctggggagcggcggggagaagacggcggtcgtgatcgacctgggagaggcctttaccaagtgtggatttgctggagaaactggtccaagatgtataattcctagtgtgataaaaagagctgggatgcctaagcctgtcagagttgttcagtataatatcaatacagaagaattatattcctacctaaaggaattcatccacatactatatttcaggcatctattggtgaatcccagagaccgccgagttgtgattatcgaatcggtattatgtccttctcacttcagagagacactcactcgtgttcttttcaaatattttgaggttccatctgtcttgcttgctccaagtcatctaatggctcttctgacgcttggaattaattctgccatggtcctagattgtggatatagggaaagcctggtgttacccatatatgaaggaatcccagttctaaattgttggggagcactacccctaggaggaaaagctcttcacaaagagttggaaactcaactattggaacaatgtactgttgacacaagtgttgctaaagaacagagccttccctcagtgatgggttcagttccggaaggtgtcttagaggacattaaagcgcgtacttgctttgtaagtgatctgaagcgaggactaaaaatccaagcagcaaaatttaatattgatgggaataatgagcgtccctccccacccccaaatgttgactatccattagatggagagaagattttacatatccttggatcaatcagagattcagttgtggaaattctttttgaacaagataatgaagagcaatcagttgccactttaatattggattcccttatacagtgtccgatagacaccaggaagcaactagcagagaatttggtagtcataggtggcacttctatgttgccaggatttctccacagattgcttgcagaaataaggtatttggtagaaaaaccaaaatataaaaaagcacttggcactaagacatttcgaattcatactccacctgcaaaagctaattgtgtggcctggttgggaggggctatttttggagcattacaagatatacttgggagccgttctgtttcaaaggaatattataatcagacgggccgtatacctgattggtgttctctcaataacccacctttggaaatgatgtttgatgtcgggaaaactcaaccacctctgatgaagagagcattttccactgagaaatagaagtttgattaaaaatcaaccttgcttcatatcaaatatttaaccaattataagcaaattgtacaaagtatgtaggatgttttgttatagaggactatagtggaagtgaaagcattctgtgtttactctttgcattaatatataattcttttgactttgtttctcttgtgtagtggtaaaatggtagctggtgcttattgagatttgctgtatttatatcaataaagtatagtaaagcagtttgattttgaaaaaaaaaaaaaaaaaaaaaaaaaaaaaa

SEQ ID NO: 212 - DNA, 913 bp, Homo sapiens
gcctcccagcaaccggtctggcggcggcgcggcagtaaaactgaggaggcggacaatgacggtcggggctgcttgctaactccaggaacaggtttaagtttttgaaactgaagtaggyctacacagtaggaactcatgtcatttcttgtaagtaaaccagagcgaatcaggcggtgggtctcggaaaagttcattgttgagggcttaagagatttggaactatttggagagcagcctccgggtgacactcggagaaaaaccaatgatgcgagctcagagtcaatagcatccttctctaaacaggaggtcatgagtagctttctgccagagggagggtgttacgagctgctcactgtgataggcaaaggatttgaggacctgatgactgtgaatctagcaaggtacaaaccaacaggagagtacgtgactgtacggaggattaacctagaagcttgttccaatgagatggtaacattcttgcagggcgagctgcatgtctccaaactcttcaaccatcccaatatcgtgccatatcgagccacttttattgcagacaatgagctgtgggttgtcacatcattcakggcatacggttctgcaaaagatctcatctgtacacacttcatggatggcatgaatgagctggcgattgcttacatcctgcagggggtgctgaaggccctcgactacatccaccacatgggatatgtacacaggagtgtcaaagccagccacatcctgatctctgtggatgggaaggtctacctgtctggtttgcgcaaacctgcagctgccctggtgctttctccaagggccatcagtgtcttgcctagcttgagggcttaagtccttatgctgtgttagtttcgttgtcagaacaaattaaaattttcagagacgctgaaaaaaaaaa

SEQ ID NO: 213 - DNA, 940 bp, Homo sapiens
ggcacgaggcaagttgaagcccgaagttgtggaggagctgaccaggaagacctactttaccgagaaggaggtccagcagtggtacaaaggcttcatcaaggactgccccagtgggcagctggatgcggcaggcttccagaagatctacaagcaattcttcccgttcggagaccccaccaagtttgccacatttgttttcaacgtctttgatgaaaacaaggacgggcgaattgagttctccgagttcatccaggcgctgtcggtgacctcacggggaaccctggatgagaagctacggtgggccttcaagctctacgacttggacaatgatggctacatcaccaggaatgagatgctggacattgtggatgccatttaccagatggtggggaataccgtggagctcccagaggaggagaacactcctgagaagagggtggaccggatctttgccatgatggataagaatgccgacgggaagctgaccctgcaggagttccaggaggggtccaaggcagacccgtccattgtgcaggcgctgtccctctacgacgggctggtatagtcccaggctggagctggatgcctgggaaccactcacctccttctgtgccatgaggccacctcagccctgacaccaaccccgtgcgtccacccagccttcttccgcatccacacacagccggctgcccttgacccgggaggccccggctctcctctcccctgtcctgcacccatcccccgcctgaagccaccggctccaattgccagcaacctctgcttgtccggaaaacgacaacacgaaatggaaaaggctacagccctctgcataaaccaaggacttggctgcctcgcaggcagcctccgttcctcccgctctcttgcgcgtgtgcttttgttttttattttgaacagacgttttaaaaaaaaaaaaaaaaaa

SEQ ID NO: 214 - DNA, 605 bp, Homo sapiens
  SITE (582): n equals a,t,g, or c
  SITE (598): n equals a,t,g, or c
  SITE (602): n equals a,t,g, or c
gattggacagttttcactgttggcagctggctttgggttatttctccatttatggcctatggttcagcaagtcaactcttgaggacctattttcctgaaggaatgagtgaaactttaataagaaacattctctttggagccgtgagagggttgaactatctgcaccaaaatggctgtattcacaggagtattaaagccagccatatcctcatttctggtgatggcctagtgaccctctctggcctgtcccatctgcatagtttggttaagcatggacagaggcatagggctgtgtatgatttcccacagttcagcacatcagtgcagccgtggctgagtccagaactactgagacaggatttacatgggtataatgtgaagtcagatatttacagtgttgggattacagcatgtgaattagccagtgggcaggtgcctttccaggacatgcatagaactcagcttggtacagctctgtttgcaacaagatcctgagaaaaggccatcagcaagcagtttattgcccatgytttcttcaaacagwtgaaagaagaaagccagggattcaatactttcactggntgccttctgcttatanccangcc

SEQ ID NO: 215 - DNA, 279 bp, Homo sapiens
tagacatagaarggctggttttccatcttgtcatacaggcagaaatactcagtgtcctcagtcacagaaacatcatccagttttatggagtaattcttgaacctcccaactatggcattgtcacagaatatgcttctctgggatcactctatgattacattaacagtaacagaagtgaggagatggatatggatcacattatgacctgggccactgatgtagccaaaggaatgcattatttacatatggaggctcctgtcaaggtgattcacagagacc

SEQ ID NO: 216 - DNA, 997 bp, Homo sapiens
  SITE (834): n equals a,t,g, or c
  SITE (895): n equals a,t,g, or c
  SITE (928): n equals a,t,g, or c
  SITE (933): n equals a,t,g, or c
  SITE (983): n equals a,t,g, or c
  SITE (990): n equals a,t,g, or c
gcagctccctgcaaaaacagaaccaataaaagaacgagcagttcaaccagcacccaccaggaagcccactgtaattcgaattccagccaaaccaggaaaatgtttacatgaggatccacaaagtccacctcctctccctgctgaaaaacctattggaaacactttcagtacagtatctggaaagctcagtaatgttgagagaactagaaacttggaatccaaccacccaggtcaaacaggaggttttgtgcgagtacccccaaggttgccaccgagacctgtgaatggaaaaaccattccaactcaacagcctycaaccaaggtgccccctgagagaccacctcccccaaagctttctgcaaccagaagatctaataagaaactgccttttaatcgatcctcttctgacatggatcttcagaaaaaacaaagtaacttggcaactggactctcaaaagccaagagtcaagtttttaaaaatcaagatccggtgctaccccctcgtcccaaaccaggacaccctctctacagtaaatacatgctgtctgtgcctcatggaattgccaatgaagatattgtctctcaaaaccccggagaactctcttgtaagcgtggggatgtacttgtgatgctgaagcagacggaaaataattacttggagtgccaaaagggagaagacactggcagagttcacctgtctcaaatgaagattatcactccacttgatgaacatcttagaagcagaccaaaccccttttctccccctaaggatccaagccacgctcagaagcctgttgacagtggtgctcctcatgctgtcggtcttctattcanaacagtgtgattgacctactttggagaatggtatcttctggagaagatagatacagatggnacagaggggaactgtagaaacccgaattggcangattntccctggccaacctatggccaaaaggggaattaatttggatatccccaanaagggangggaaaa

SEQ ID NO: 217 - DNA, 1849 bp, Homo sapiens
tcgacccacgcgtccgcgggactcagcgggttctcctggataacgtcctgtcggaagaacagtgccgggagctccacagcgtggccagtggaatcatgcttgttggtgatggatacagaggaaaaacttcaccccatacacccaatgaaaagtttgaaggtgcaactgtcctgaaagcactcaaatctggttatgaaggtcgagtcccactgaagagcgctcgtctgttttatgacatcagcgaaaaggctcgaaggattgtagaatcttattttatgctgaactcaactctgtatttttcctatacacacatggtctgccgaacagccctgtctggtcagcaggatagaagaaatgacctcagtcatcccatccatgctgacaactgtttgttggatccagaggccaacgaatgctggaaggagcctcctgcttacacatttcgagactatagtgctctcctatatatgaatgatgactttgaaggaggagaattcatattcacagagatggatgctaagactgtgactgcctctataaaaccaatgtgggcgcatgatcagcttctcatctggaggagagaaccctcatggggtgaaggcagtcaccaagggaaagaggtgtgctgtggctctgtggttcaccttggacccactttatagagaattggagcgaatacaggctgatgaagtgattgcaattctggatcaagaacagcaagggaagcatgaactgaatatcaaccctaaagatgagctataaaaatgagaaagaatgttctatcaaatatttatttaaattgttaatcttatgagaacctttttatttttgtacagagccatggtataaattaacaggttaatgtcagtcatcagatcttccttctcttcctaaggatgcttgtgttgcctcaatctatcaatctatctttcttgttttgggttgttttctctctctctctctctctctctcttcttagagacatggtctaaccatgttgtctaggatatagggcagtggctattcacagatgtgatgatagcacactggagcctcaaactcttaggctcaggcgatccttcaagcctcccggggagctgggaccacaggcacgtgccaccacacccagctctctttcttggtttttcatcatttcatgtatctatcaaagcccagttcacctcctcccccaaacacacacacacacacacacacacacacacacaattaagttgctgcaaattcaaaagcttagagagaataagcttcttggtggtgaaactacaactctcacgtgtgctccagttctaaaattaacctgtgcctggtctctgaagccctttcttgctctgtgcctttcagccacatccttaggtgctaacggccatgagctccgactctccaaagtgagctccactttgggtctgaggagcccctggcagagtccacgctgcctcaggtatcatgggcgtaatgatcacccaggctccgggagatctcatggatgattactgtatgagacagaggggacttcagtctttccagggccttggtggaatttttggctctggtgttttcgccagacaataaacttacactggaagctttgattcaccctccacagtactccagaaaggactgtcctataagttgtacactttaaaaggtcatgtagaggttgtagtagaatggcttttcaccctggtgactttggaagaaactcttgaatactgcctgcatccgggcaccatggccaggttgcctaggagtggggtccactgatgaaaagaggtgttttgtacttacataagaaaaataaatttctgattgattttaaaaaaaaaaaaaa

SEQ ID NO: 218 - DNA, 2104 bp, Homo sapiens
ggcacgagctccgacgccccgggcaagagaacgccaggagggataacgggaggaaggccggccggggccgccaaggcagtcccaggctcgcgtaggaggcgcgcagaccttgcaccttgcaccttcgcagcgccctgcaccccgccaccatgtgcgagctgtacagtaagcgggacactctggggctgaggaagaagcacatcgggccctcatgcaaagttttctttgcatcggatcccatcaaaatagtgagagcccagaggcagtacatgtttgatgagaacggtgaacagtacttggactgcatcaacaatgttgcccatgtgggacactgtcacccaggagtggtcaaagctgccctgaaacagatggaactgctaaatacaaattctcgattcctccacgacaacattgttgagtatgccaaacgcctttcagcaactctgccggagaaactctctgtttgttattttacaaattcaggatccgaagccaacgacttagccttacgcctggctcggcagttcagaggccaccaggatgtgatcactcttgaccatgcttaccatggtcacctatcatccttaattgagattagcccatataagtttcagaaaggaaaagatgtcaaaaaagaatttgtacatgtggcaccaactccagatacttacagaggaaaatatagagaagaccatgcagactcagccagtgcttatgcagatgaagtgaagaaaatcattgaagatgctcataacagtggaaggaagattgctgcctttattgctgaatccatgcagagttgtggcggacaaataattcctccagcaggctacttccagaaagtggcagaatatgtacacggtgcagggggtgtgtttatagctgatgaagttcaagtgggctttggcagagttgggaaacatttctggagcttccagatgtatggtgaagactttgttccagacatcgtcacaatgggaaaaccgatgggcaacggccacccggtggcatgtgtggtaacaaccaaagaaattgcagaagccttcagcagctctgggatggaatattttaatacgtatggaggaaatccagtatcttgtgctgttggtttggctgtcctggatataattgaaaatgaagaccttcaaggaaatgccaagagagtagggaattatctcactgagttactgaaaaaacagaaggctaaacacactttgataggagatattaggggcattggcctttttattggaattgatttagtgaaggaccatctgaaaaggacccctgccacagctgaagctcagcacatcatctacaagatgaaagaaaaacgagtgcttctcagtgccgatggacctcatagaaatgtacttaaaataaaaccacctatgtgcttcactgaagaagatgcaaagttcatggtggaccaacttgataggattctaacagttttagaagaagctatgggaaccaaaaccgaaagtgtgacctctgagaatactccatgcaaaacaaagatgctgaaagaagcccacatagaactgcttagggacagcaccactgactccaaagaaaatcccagcagaaagagaaatggaatgtgcacggatacacattcactgctcagtaagaggctcaagacatgactgatttgcattttaaagcaagatgcgatgtccagagttacagagaatgagtagatgtgtctcatcggttaatagctctattatacctctaaaggtggaattgtcagtttagattcataaatgaaaaggtaaatgagtaatcagaataaaccaagtgataatcaaaccatgtcaagattattagttcagactctagcctgttaattttcttagttgatttctgaagctacctgatttattctattaaattgtaagcttgcaaactcaaaataaattggcagatttacctctcatgttttaatgtgtcaaattagagagcaaagtataacaggtgccttcacttttgagacttagtgccttaaaatatgtattctataatgatttcatatataaaagtatatttattgactgtaataaaataaaatatgatgtaaacaaaaaaaaaaaaaaaaaaa

SEQ ID NO: 219 - DNA, 979 bp, Homo sapiens
  SITE (2): n equals a,t,g, or c
  SITE (13): n equals a,t,g, or c
anatactcctcantaaatttaacaaaagctggmgctccaccgcggtggcggccgctctagaactagtggatcccctgggcattatggaacacggcgcataacgtcggcggcgcactcattcccattgtgatggcagcggctgcgctgcattacggctggcgtgccgggatgatgattgctggttgtatggcgatagtcgtggggatttttctctgctggcggctacgcgatcgcccgcaggcgttaggtttaccggcggtcggtgaatggcgacacgacgcgctggaaattgctcaacaacaagaaggggcagggttgacgcgtaaagagatcctcaccaaatatgtgttgctgaatccgtatatctggctgctttcgttttgctatgtgctggtctatgtggtccgggcggcgatcaacgactggggcaatttgtatatgtccgagacactgggcgtcgatctggtcacggcgaatacggcagtgacgatgtttgaactgggcggatttatcggtgcgctggtagccggttggggctcggacaaattgtttaacggcaaccgagggccgatgaatttgattttcgccgccggaattttgctttcagtcggctccctgtggctgatgccatttgccagctacgtgatgcaggcaacctgcttcttcaccattggtttttttgtctttggcccacagatgttaatcggtatggcggcggcagagtgttcccacaaagaggcggcaggggcggcgacggggtttgtcggcttgtttgcttatctgggggcgtcgcttgctggttggccgctggcgaaagtactcgatacctggcactggagcggattttttgtggttatctctatcgccgccgggatttccgcactgctgttactgccctttttgaacgcccagacaccgcgcgaagcgtgatgcatctcaccttttcacttcatatccggcaaaactaagaaattttcca

SEQ ID NO: 220 - DNA, 1697 bp, Homo sapiens
  SITE (1666): n equals a,t,g, or c
tttttttttttttttttttttttttttttttcttgtattctaatgctatttattatcacaataaataattcactgcaaatgactgcatgaaaaatgtgggttccagagcaccatgtataaaatgatcccatttatgtagaactgtaaacatacatccacacactgacggacaggtacatatgcatgtttggggaggggtctggaatgatcacccaagtggacagggtgaggggtggtttcctgtattttttacaataagcatttatgacttttacaaaatcaccaaagctatcactttttccatttagaaaacacaaaattatttttaaatagagacttgacgtcatttgacacaccttggttttctctcggagagcacagatgccgcagacaagaggagcggacccgcctcccagactcctgcctgccccgtccctcccccgcaggtggcactggtgagccgggaaggtgctgccagccccaggatgcctcgcacagcccgggctggaaacccctgcccctgcttcctcgcacagtctgtcattctagaaggctctctccaaaccactcttccaaagagggtcatgccagggaacagcagcgaggtyattttccagtcatcccacaggaagccagtgagccccactccmctgccgtggacctccaggcctggcttccttctcttccctgggttacctgctcaggggtttctcagccaggccagcatgtctatcaggcggcatccagcatccaatcacagtgacaagaaccttccggaacaccctgcaaactgtggatgcccacgggtggccccattatgccttgagcagggcaaccttttggtccagaatggagtcttctctgatgttgtagggctgggtccctggctcctgcctcaggtgcttctctgcttcttccagggtagagaagtactggaaccccttcaggtcagcggacagcaggacacggagaacggggacctgcaggcccacaaaggccagggcgacgccctgcttctggaagtcctggaggagctcgccgagtcccagcaccacagtgtagtcgatgctgcagacatgggtgcactccaggaccaggcagcgtggcggggacacttccagggcccggcttaggatctcctcccgcagagcctccatggcagggaaggacaggccgctggccggctgcaggaccagaaccggcccctctgacaccttggtctcaggcctggctgcagagtgcaggagcatgagcagagacaccagggccccggccaggatgccgtactgcacctcccagaagcacagcaggaaggtcacgcacaggggcagcaggtccagcctcttaacacgccagagcgtcctgaagatcttggtgtcgaacagcggggccacggccatgatgatgacggcagccagggcagacttggggatgtagtagaacagtgaggtcaggtagtccagagacagcagcaccagcactcccgtcaccaggcccccgccggggtgcacacccccgactgagcgttcacggctgtccgtccaaagctgcctgtgaccgggtaggaggagacgagggagcccaacatgttggtgagaccgatggccagcagctcctggttggcatcgatgcggtaattattctgagatgcgaaggctttggccancgcaatgctctccaggaggccatcaggggca

SEQ ID NO: 221 - DNA, 2418 bp, Homo sapiens
  SITE (1): n equals a,t,g, or c
  SITE (2): n equals a,t,g, or c
  SITE (3): n equals a,t,g, or c
  SITE (4): n equals a,t,g, or c
  SITE (14): n equals a,t,g, or c
  SITE (2322): n equals a,t,g, or c
  SITE (2395): n equals a,t,g, or c
  SITE (2401): n equals a,t,g, or c
  SITE (2416): n equals a,t,g, or c
nnnnggggagtgcnattatcgccagctcgaamttawccctcctamagggaacaaaagctggagctccaccgcggtggcggccgctctagaactagtggatcccccgggctgcaggaattcggcacgaggagagaactagtctcgacgacatagaaattacatgagcagaacacatttacatactcctccagacctaccagaaggctatgaacagaggacaacgcaacaaggccaggtgtatttcttacatacacagactggtgtgagcacatggcatgatccaagagtgcccagggatcttagcaacatcaattgtgaagagcttggtccattgcctcctggatgggagatccgtaatacggcaacaggcagagtttatttcgttgaccataacaacagaacaacacaatttacagatcctcggctgtctgctaacttgcatttagttttaaatcggcagaaccaattgaaagaccaacagcaacagcaagtggtatcgttatgtcctgatgacacagaatgcctgacagtcccaaggtacaagcgagacctggttcagaaactaaaaattttgcggcaagaactttcccaacaacagcctcaggcaggtcattgccgcattgaggtttccagggaagagatttttgaggaatcatatcgacaggtcatgaaaatgagaccaaaagatctctggaagcgattaatgataaaatttcgtggagaagaaggccttgactatggaggcgttgccagggaatggttgtatctcttgtcacatgaaatgttgaatccatactatggcctcttccagtattcaagagatgatatttatacattgcagatcaatcctgattctgcagttaatccggaacatttatcctatttccactttgttggacgaataatgggaatggctgtgtttcatggacattatattgatggtggtttcacattgcctttttataagcaattgcttgggaagtcaattaccttggatgacatggagttagtagatccggatcttcacaacagtttagtgtggatacttgagaatgatattacaggtgttttggaccataccttctgtgttgaacataatgcatatggtgaaattattcagcatgaacttaaaccaaatggcaaaagtatccctgttaatgaagaaaataaaaaagaatatgtcaggctctatgtgaactggagatttttacgaggcattgaggctcaattcttggctctgcagaaaggatttaatgaagtaattccacaacatctgctgaagacatttgatgagaaggagttagagctcattatttgtggacttggaaagatagatgttaatgactggaaggtaaacacccggttaaaacactgtacaccagacagcaacattgtcaaatggttctggaaagctgtggagttttttgatgaagagcgacgagcaagattgcttcagtttgtgacaggatcctctcgagtgcctctgcagggcttcaaagcattgcaaggtgctgcaggcccgagactctttaccatacaccagattgatgcctgcactaacaacctgccgaaagcccacacttgcttcaatcgaatagacattccaccctatgaaagctatgaaaagctatatgaaaagctgctaacagccattgaagaaacatgtggatttgctgtggaatgacaagcttcaaggatttacccaggactctatttatacaaccctgactgacagcctcctttcagcagagtttcaaagaatatgctgaaatacaggaaaacactccccccccccccytttttttttttttttttacattttaggacactgtgaggggaaaggacaattttgaaattccttttcaaggaaaaaaaaggtctttatgctttgccatgaggccacattcagctgctatttaaacttaatatcttgaacctaaagaatgctgacttttcctacatttccagagttaggcagtattctacacttaaagactactactatttttataaaaggtaatctattcaaatttcttcacagatttcaagtctctcaaacatcaagacaacttcagcagtcggtacaagtcacatttcattttgattgaatacatgatcttgaacagctcctgtacttgctctttgtaaaaaaaaataaaaaaaactcgagggggggcccggtacccaattcgccctatagtgagtcgtattacaattcactggccgtcgttttacaacgtcgtgactgggaaaaccctggcgttacccaacttaatcgccttgcagcacatccccctttcgccagctggcgtaatagcgaanaggcccggaccgatcgccctttccaacagttgcgcagcctgaatggcgaatggcaaattggaagcgttaatanttggtnaaaatcgggtaaaantt

SEQ ID NO: 222 - DNA, 841 bp, Homo sapiens
tgtgtggcacccagatcacgctgtggttatctgcagttcctttktagtattgtacaaagtttcttgaagatttttaaatacataagtttaaaagagaattaactttcaatttgcaaattaaaatgagaatggttgccttttcttcattatcaagagatggtgagttgtcctcctgtaagtaaattggttcttttctttctaatattgtgttccttgaaaccttactctagtatgcagggagagtggagggtgcctaagtgtaaaataattaaaacttaagctgatataattatcaataatagtaaccagttctgatatctacttgataccataacggtgagcattgatagactttcatagatttttacataagattagcttgagcaagttttcctcttttgtaggtactggggggaaaattctggaaaaatttttagagagttctttctaaaatgtcgaaatgcaaagctgtataaattgctgttgacgttagctgtctgaccaggaagtactctctttaagcctcacttaaaaaactaagtgtctgtaataacttcctttctcgggatgaaggtgctgatagcctggggtgttcttataacttaagttcagttttttctttcctgtgaggaagaggcagttttttaaatgaagccatctctggggaaatcgtattgattgttgtagctaaatacggaatttttaaagtctttagtatgttgaactggmaatataggmcatgcgtttgagatctactgtgagtaagtgtcattggtattttattttacatttaatgttgattataaatatggtttgtgtctaaacactgttaaaaaaaaaa

SEQ ID NO: 223 - DNA, 751 bp, Homo sapiens
  SITE (1): n equals a,t,g, or c
  SITE (7): n equals a,t,g, or c
  SITE (10): n equals a,t,g, or c
  SITE (17): n equals a,t,g, or c
  SITE (19): n equals a,t,g, or c
ngaggtntancgccccntncgtatgcccctccgggattaaagctggagctccccgcggtggcggccgctctagaactagtggatcccccgggctgcagggaaaaagaaaaaaagaaaaaaatcagcaatttatagaaagaagctatagtctgtcgggatatccaacaccaacagatattctgatggcaaaacaagtggaagaaaagaggaagcatgactgcagatcagatcagttctctttgtggattatattttcagtaaaatgtatggatctatcttttccttgttcttatatctagatcatgagacttgactgaggctgtatccttatcctccatccatctatggcgaactatagccatgcagctgacaacattttgcaaaatctctcgcctctaacagcctttctgaaactgacttccttgggtttcataataggagtcagcgtggtgggcaacctcctgatctccattttgctagtgaaagataagaccttgcatagagcaccttactacttcctgttggatctttgctgttcagatatcctcagatctgcaatttgkttcccatttgkgktcaactctgtcaaaaatggctctacctggacttatgggactctgacttgcaaagtgawtgcctttctgggggktttgkcctgkttccacactgctttcatgctcttctgcatcagkgtcaccagatacttratwtcgcccatyaccgcttctatacaaagaggctgrcctttaaa

SEQ ID NO: 224 - DNA, 4634 bp, Homo sapiens
ccacgcgtccgcgccccggaaaccatggaagtcctcgtcctggccggataccgcgcgcagaaggaggacgagctgagtctggcgcccggggacgtggtccggcaggtgcgctgggtgcccgcgcggggctggcttcgcggagagtttgggggccgctatggcctcttccccgagcgcctggtgcaggagatcccagagaccctgcggggctccggagaggcgcggaggccgcgctgtgcgcgccgccgaggtcatcctgccaaacacccgaggccccaaagatggtgcaaagtgaacttcagctacagcccagagcaggcggacgagctgaagctgcaagctggggagatcgtggaaatgataaaggagattgaggacggctggtggctggggaagaagaacgggcagctgggagccttcccatccaactttgtggaattgctggacagtgggcccccaagccttggtaacccagacatgccttcagtcagcccgggtccccagcggcctcccaagctgagcagcctggcctatgacagccctccagactacctgcagacagggtcctgtttgactaccagcctgaggccccagacgagttggcgctgcggaggggggacgtggtaaaagtactcagcaagaccacagaggataagggctggtgggaaggagagtgtcaaggacgaagaggagtttttccagacaactttgtactcccaccacccccaatcaagaagctggtcccacggaaagtggtatctcgggaatcagctcctattaaggaaccaaaaaattgatgcccaaaacatccctccccacagtcaagaagctagcaacagccaccactgggcccagcaaagccaagacatctcggacacccagcagggacagtcagaagctcacctcccgagactcaggccccaatggtggcttccaaagtgggggttcgtatcaccctggccgaaagcgatccaaaacccagactccccagcaacgctctgtgtccagtcaggaggaagagcacagcagcccggtaaaggccccctctgtgaagagaacccccatgccggacaagactgccaccccagagaggcccccagctccagagaacgcccccagctccaagaagatcccggctcctgacaaagtcccctccccagagaagaccctcactctaggggacaaggcctctatcccagggaactccacctcggggaagatcccagctcctgacaaagtccccaccccagagaagatggtgactccggaggacaaggcttctatcccagagaactccatcatcccagaggagaccctgactgtggacaaaccctccactccagagagggtcttttcagtggaagagtcccctgccctagaagccccacctatggataaagtccctaatccaaagatggcccctctgggggatgaggcccccactctagaaaaggtcttgaccccagagctttctgaagaagaggtgtccaccagagatgacattcaattccatcacttctcttcggaggaagccctgcagaaggtcaagtactttgtagccaaagaggatccatcatcccaggaggaggcccacacgccagaggcacccccaccccagcctccttcctcagagaggtgcctgggagagatgaaatgtaccctagttagaggggacagctccccacgccaggctgagttgaagtctgggccagcatccaggcctgcccttgagaagccccacccccacgaagaggctacaacccttccagaggaggcaccttccaatgacgagaggacccctgaagaggaggcgccccccaacgagcagaggcctctgagagaggaggtgctccccaaagagggagtggcttccaaagaggaggtgaccctgaaagaggaattgccccctaaagaggaagtggctccaaaagaggaggtgccccccatagaaagagcctttgcccaaaaaacacgtcctatcaagccgcctccagactcccaagagacgctcgcgctcccctcgctggtcccgcaaaactacacggaaaacaagaatgaaggagttgatgtaacgtcgctgaggggcgaggtggagtctctaaggagggcgctggagctgatggaggaggaagctgaccgacatctgggaggagctgaagagcgagaaggagcagcgccggcggctggaggtccaggtgatgcaggggacccagaagtcccagaccccgcgcgtcatccacacgcagacgcagacctactgagggtgggcctgggaagggaccgcggcctgacctggctggggccacccacgtccttgcacacgactttgggaaacgcgagaaagtaaactctgcctagcacggcgccacgccggtctggtcgctgggggcggggcctgcgcgggggcagggcctgggcctccgcattcctgacggtccctcccaggcacatctggccaacatgtggctcccattaccgttcccaaggcctgcgcgcggctatttttatccaccggatggtgaggggcgggggagggtgtctccttcggactccagccgcgcactggagaaatggcgggcaggaggggcccaggcggggtcgggctcttgacgcccggcctagattccggaatccagctgtgcgccggggaggagccgggcgggccttctcgccagctcggacccctcccagctggcctccctgtccgctcagagggactcctgccctctcgcttgaacgcacctcggcgcagacgtgaagtccaccgtccagcccaagcacgcatgcttacaccggggctagcagcaccttagcctcgaggtcaggatcctgaggcctggtgtgtgtgtcattgcagtgtatgaacccagggcactgtggggacagggcgacgtgtgtccaggcgtttgccggtaaggaatgcgttttgaataaggaatgcgcgcgcgcttgctctgtgtgtgaggctgggtgcaggcctgtgggcttctgcttttctgctggctgtgaagtgaatgcgggcaggtgtgctgtatcgtcgggttggtgggtgggggtggtgcagctagggtaagggagtcaagctgggcctcagtcctggggcccctgcgtggcaggagcctgggggtcgctgggggcaggagtaacagagggagagactgagtcactgagaatgcagctttctttcatttggtcacttcacctcttcatcgaccccagagagggagtggggaccctgcatgctgccccctccccgcccccggggtcttctggcaggactggggaagggagcctctcagggggtggcggtccacgcccagtagcacctgggagctgtgggggccgaggcagtccgaaggtgtggggtagctctgagctcatgtgcaggtccggtaccccgagcgccttgcagcgggagccggggcccatcagtaatagtgcatgcggcccagggtgcccgtggccgtggggctgggccccagcgtgcctgtgcccagcaggtccggctgcccggtgcgccagatctcccgcaggatccgttcgcgctcctccagccgctgcgcccgctccagctcctccgccgacgtgaagacgttgacgttgaggggcccgtccggctctgcggacagctcggggcccggcagcgtgtcgtcggggcccagccgagtcaccgtgtcctcctcgtcctcgtcgtcgtcctcgggctccagggtgctgctgcgggggtcccggcgctgagccgggccccggggccgcgggcggggcgcccacgagatgctgatgacgagcaggcagagggtgagcagcaggccgaagcagacgcccagcacgaagtagaggccgaagctctcggggttggctgcggggcacagggcgggggtcacggaggggcccggacgggtgggggttgtcccacttccgaaagaccccaggttctaggtgtgggggcgaggcctgtaacccctactcgaagggcattagggaaccgccagcgggcaagagggcggggagcggggcggaggggacggacaaggcgctggggagggaaggggatggtggtcagggaagggttcaggcccccagtcttccggcgcccgccctcaccgcggatgtgcgcgtaggcagccaggctgttgctgagcaactccatgtcccttcgcggggcatccatgctgctctgggggcagctcccctaccagcctgcgaggtcagcaaagtcagatccttctcccagcctggagcccaccccgaccccttccgcgggcagctcctctcccgggagccgcgggcccaggttccaccctggagagagcgcttccctaacttcgtggcggcccggggccctgtcggggggaacccctctcccgggcgcggacgcccctccagtcctgggagcagcgccggggaccgcgggaggccccgccccctggtgaggtccccagctgaggcccggttccgccgtcccggggcgggatggaggatagggacgctgagcctccacgccccaggcgggctccgggaagggaagctgcctctctcctcgcccggccgccccgcggggacccaccggcccggggccaggcccactcaccgtcagcgccccgcttcccggctgcccggccccagcgcgtccc

SEQ ID NO: 225 - DNA, 357 bp, Homo sapiens
aaatctcgcttcagtcactctgccgaaggcgctgacggcatcgcggccggaacctctgggcccggcccctcccagggccgccgctccgtgggaaaaaacagctcctccatttccttgaaaactgaacgattattaaaaatagattaaacttcgctggaaatgagtagccaggaagttcaggggagggtgccgggtccttcccgggcctggcgtgtcggagccacccaggtcccgcagctgccgctgagaaaatgcaaatatttgttgtgacaagaatcacatacatttactttaaatatagttgccttttttggtcaaaaaaaaaaaaaaaaaaaaaaaaaaaaaaaaaaaaaaaaa

SEQ ID NO: 226 - DNA, 2247 bp, Homo sapiens
ggcacgagctcatccatgcttggagaaggacaagtccttcggagcccaaccaaccggctgcttctgcacttccagagcccacgggtcccaaggggcggtggcttcaggatccactatcaggcctacctcctgagctgtggcttccctccccggccggcccatggggacgtgagtgtgacggacctgcaccctgggggcactgccacctttcactgtgattcgggctaccagctgcagggagaggagaccctcatctgcctcaatggcacccggccatcctggaacggtgaaacccccagctgcatggcatcctgtggtggcaccatccacaatgccaccctgggccgcatcgtgtccccagagcctgggggagccgtagggcccaacctcacctgccgttgggtcattgaagcagctgaggggcgccggctgcacctgcactttgaaagggtctcgctggatgaggacaatgaccggctgatggtgcgctcagggggcagccccctatcccccgtgatctatgattcggacatggacgatgtccccgagcggggtctcatcagtgacgcccagtccctctacgtggagctgctgtcagagacacctgccaatcccctgctgttaagccttcgatttgaagcctttgaggaggatcgctgcttcgcccccttcctggcacatggaaatgtcactaccacggaccctgagtatcgcccaggggcactggcaaccttctcgtgcctcccaggatatgccctggagccccctgggccccccaatgccatcgaatgtgtggatcccacagaaccccactggaacgacacagagccggcctgcaaagccatgtgtggaggggagctgtcggaaccagctggcgtggtcctctctcccgactggccccagagctatagcccgggccaagactgcgtgtggggcgtgcacgtccaggaagagaagcgcatcttgctccaagttgagatattgaatgtgcgggaaggggacatgctgacgctgttcgacggggacggtcccagcgcccgagtcttggcccagctgcggggacctcagccgcgccgccgccttctctcctctgggcccgacctcacactgcagtttcaggcaccgcccgggcccccaaatccaggcctgggccagggcttcgtattgcacttcaaagaggtcccgaggaacgacacgtgccccgagctgccacctccggagtggggctggagaacggcatcccacggggacctgatccggggcacggtgctcacctaccagtgcgagcctggctacgagctgctaggctccgacattctcacttgccagtgggacctgtcttggagcgccgcgccgcccgcctgccaaaagatcatgacttgtgctgaccctggcgagattgccaacgggcaccgcaccgcctcggacgccggcttccccgttggctcccacgtccagtaccgctgcctgccagggtacagcctcgagggggcagccatgctcacctgctacagccgggacacaggcacacccaagtggagcgatagggtccccaaatgcgccttgaagtacgagccgtgcctgaacccgggggttcccgagaatggctaccagacgctgtacaagcaccactaccaggcgggcgagtctctgcgcttcttctgctatgagggctttgagcttatcggcgaggtcaccatcacctgtgtgcccggccacccctcccagtggaccagccagcccccactctgcaaagttgcctatgaggagctcctggacaaccgaaaactggaagtgacccagaccacagatccatcacggcagctggaaggggggaacctggccctggccatcctgctgcctctaggcttggtcattgtcctcggcagtggcgtttacatctactacaccaagcttcagggaaagtcccttttcggcttctcgggctcccactcctacagccccatcaccgtggagtcggacttcagcaacccgctgtatgaagctggggatacgcgggagtatgaagtttccatctgaaccccaagactacagctgcaggacccaggacgcccctcccctcctcattcgggcagagggaaatacgggacccggtctctgcctcctggctgccctcctccctggctgtgtaaatagtctccctatcccacgagggggctttgatggccctggagatcctacagtaaataaaccagcatcctgccgcccaaaaaaaaaaaaaaaaaa

SEQ ID NO: 227 - DNA, 573 bp, Homo sapiens
  SITE (531): n equals a,t,g, or c
gcctgcaccgagacctcaagacccagaacatcctgcttgacaaacaccgcatggtcgtcaagatcggtgatttcggcatctccaagatccttagcagcaagagcaaggcctacacggtggtgggtaccccatgctatatctcccctgagctgtgtgagggcaagccctacaaccagaagagtgacatctgggccctgggctgtgtcctctacgagctggccagcctcaagagggctttcgaggctgcgaacttgccagcactggtgctgaagatcatgagtggcacctttgcacctatctctgaccggtacagccctgagcttcgccagctggtcctgagtctactcagcctggagcctgcccagcggccaccactcagccacatcatggcacagcccctctgcatccgtgccctcctcaacctccacaccgacgtgkgcagtgtccgcatgcggagggcagagaagtccgtggsccccagcaacacagggagcaggaccaccartgtccgctgcagaggtatcccccggngacctgtgaggccagccatcccaccaccactgtcgtcagtgt

SEQ ID NO: 228 - DNA, 970 bp, Homo sapiens
  SITE (789): n equals a,t,g, or c
  SITE (862): n equals a,t,g, or c
  SITE (885): n equals a,t,g, or c
ggcacgaggcgaggtgcgctacgtgaaggagccatacatccagtcgcgcttctaccgggcccctgagatcctgctggggctgcccttctgcgagaaggtggacgtgtggtccctgggctgcgtcatggctgagctgcacctgggctggcctctctaccccggcaacaacgagtacgaccaggtgcgctacatctgcgaaacccagggcctgcccaagccacacctgttgcacgccgyctgcaaggcccaccacttcttcaagcgcaacccccaccctgacgctgccaacccctggcagctcaagtcctcggctgactacctggccgagacgaasgtgcgcccattggagcgccgcaagtatatgctcaagtcgttggaccagattgagacagtgaatggtggcagtgtggccagtcggctaaccttccctgaccgggaggcgctggcggagcacgccgacctcaagagcatggtggagctgatcaagcgcatgctgacctgggagtcacacgaacgcatcagccccagtgctgccctgcgccaccccttcgtgtccatgcagcagctgcgcagtgcccacgagaccacccactactaccagctctcgctgcgcagctaccgcctctcgctgcaagtggaggggaagccccccacgcccgtcgtggccgcagaagatgggaccccctactactgtctggctgaggagaaggaggctgcgggtatgggcagtgtggccggcagcarccccttcttycgagaggagaargcaccaggtatgcaaagagscantsgaccagctggatgacctgagtctgmaggaggctgggcatgggctgtggggtgagacctgsaccaatgcggncttccgacatgawgggccccctnaaggcagcatactggccaccatgtgccccgactcgggccctgagcccatcctggccttctacagcaagccgctggcaggccgcaa

SEQ ID NO: 229 - DNA, 2958 bp, Homo sapiens
caggtaccggcccggaattcccgggtcgacccacgcgtccgcaaggattgtagcttggactgtgcgggttcgccccagaaacctctctgcgcatctgacggaaggaccttcctttcccgttgtgaatttcaacgtgccaagtgcaaagatccccagctagagattgcatatcgaggaaactgcaaagacgtgtccaggtgtgtggccgaaaggaagtatacccaggagcaagcccggaaggagtttcagcaagtgttcattcctgagtgcaatgacgacggcacctacagtcaggtccagtgtcacagctacacgggatactgctggtgcgtcacgcccaacgggaggcccatcagcggcactgccgtggcccacaagacgccccggtgcccgggttccgtaaatgaaaagttaccccaacgcgaaggcacaggaaaaacagtctccttgcaaatcttttccgttctgaattcagatgatgccgcagctccagckttggagactcagcctcaaggagatgaagaagatattgcatcacgttaccctaccctttggactgaacaggttaaaagtcggcagaacaaaaccaataagaattcagtgtcatcctgtgaccaagagcaccagtctgccctggaggaagccaagcagcccaagaacgacaatgtggtgatccctgagtgtgcgcacggcggcctctacaagccagtgcagtgccacccctccacggggtactgctggtgcgtcctggtggacacggggcgccccattcccggcacatccacaaggtacgagcagccgaaatgtgacaacacggccagggcccacccagccaaagcccgggacctgtacaagggccgccagctacaaggttgtccgggtgccaaaaagcatgagtttctgaccagcgttctggacgcgctgtccacggacatggtccacgccgcctccgacccctcctcctcgtcaggcaggctctcagaacccgaccccagccataccctagaggagcgggtggtgcactggtacttcaaactactggataaaaactccagtggagacatcggcaaaaaggaaatcaaacccttcaagaggttccttcgcaaaaaatcaaagcccaaaaaatgtgtgaagaagtttgttgaatactgtgacgtgaataatgacaaatccatctccgtacaagaactgatgggctgcctgggcgtggcgaaagaggacggcaaagcggacaccaagaaacgccacacccccagaggtcatgctgaaagtacgtctaatagacagccaaggaaacaaggataaatggctcataccccgaaggcagttcctagacacatgggaaatttccctcaccaaagagcaattaagaaaacaaaaacagaaacacatagtatttgcactttgtactttaaatgtaaattcactttgtagaaatgagctatttaaacagactgttttaatctgtgaaaatggagagctggcttcagaaaattaatcacatacaatgtatgtgtcctcttttgaccttggaaatctgtatgtggtggagaagtatttgaatgcatttaggcttaatttcttcgccttccacatgttaacagtagagctctatgcactccggctgcaatcgtatggctttctctaacccctgcagtcacttccagatgcctgtgcttacagcattgtggaatcatgttggaagctccacatgtccatggaagtttgtgatgtacggccgaccctacaggcagttaacatgcatgggctggtttgtttcttgggattttctgttagtttgtcttgttttgctttccagagatcttgctcatacaatgaatcacgcaaccactaaagctatccagttaagtgcaggtagttcccctggaggaaataatattttcaaactgtcgttggtgtgatactttggctcaaaggatctttgcttttccattttaagcttctgttttgagttttgccctggggcttgaatgagtcccagagagtcgttcggatggtgggaggctgcctaggaggcagtaaatccagtcacagtgcctgggaggggcccatccttccaaaatgtaaatccagtcgcggtgtgaccgagctggctaacaggcttgtctgcctggttttcctcctacacgtggacattattctcctgatcctcctacctggtccaccccagggctaccggaaggtaaaatcttcacctgaaccaattatgagcagtctccttactgaaggtacagccggatacgtggtgcccccggggctggtgttggcagccggggggaggtgcctgagggtccccacggttcctttctgcttttctgaatgcatcaagggtacgagaacttgccaatgggaaattcatccgagtggcactggcagagaaggataggagtggaatgcccacacagtgaccaacagaactggtctgcgtgcataaccagctgccaccctcaggcctgggccccagagctcagggcacccagtgtcttaaggaaccatttggaggacagtctgagagcaggaacttcaagctgtgattctatctcggctcagacttttggttggaaaaagatcttcatggccccaaatcccctgagacatgccttgtagaatgattttgtgatgttgtgatgcttgtggagcatcgcgtaaggcttcttgcttatttaaactgtgcaaggtaaaaatcaagcctttggagccacagaaccagctcaagtacatgccaatgttgtttaagaaacagttatgatcctaaactttttggataatcttttatatttctgacctttgaatttaatcattgttcttagattaaaataaaatatgctattgaaactaaaaaaaaaaaaaaaaaaaaaaaaaaaaaaaaaaaaaaaaaaaaaaaaaaaaaaaaaaaaactcgagggggggcccgtacccaattcgccctatagtgag

SEQ ID NO: 230 - DNA, 3728 bp, Homo sapiens
ccacgcgtccgcacaacactctgaatgttaatccagatccctcttgttgagtagctgcagagacggcagatggaaaatatgctcagaagttgtttaatgacctttttgaagattattccaatgctcttcgtccagtggaagatacagataaagtcctgaatgtgaccctgcagattacgctctctcagattaaggatatggatccaatccagaataccacattatatttagccaaaatatacttttcggggaaaaacttgtaaggaagacttcaaaaatatgcatccaaatgttaacagaaatgtaccaattaaggctctttggttgtaagcatcagaaactgactttggcaaccttgtgaaataggaatttgttagaaggatgtggcacatctcattgaattaaaggaaaaagtaaacaaccagctcttggaaaggacagaaccaaggctgctctagtgttcaaggcaggagggactgtctgttttttttcagccatcactagggtgatgcttttggtctctggatcactctgcttaagatcgaaactctggagagggtgaatctgttggaccaagcctgggccacccagccggcctttggccagggacactggggcaccttgaccaacacttcctctgccttgcaatgggagaggaagtaatgggagaaggaggaagtaacgggagaaagagtaattccctagagaaaaatagaaattctgtaccccaaaatacaaggcataaatattgataaagcaaaagaagatatatctggaataagtgactatctctaaagttatgggtgaacaactttttttctctgagttttccaaatgttacaaataaacatgtacaacttttataatagcaataaagttattgcttaaaggcatgaccccaggcctttatttttagaatattattttaatattctagtgcctaaagttaacaaatcaagtaagcagattttagtatcgacaggcttactttttgtctgcgtgttcaaatcattacacctggaccaagaaagtgacactgggaatggacaggaagggacagagagaagagatgctttaaaggaagaatccaagagaacttggccctgactagttacaggagatggaggagaaggacaaattagagttgattccagacttccgagccacagtgacaggcaaaatggtggtccattgccaaaacactgaagtgatggggacagtgagctgtctggggtaaggaaggtggcaagttctcctagcatgcggctttcattttccttatctgaccttcagggctgatgatgaatcttcagagcctgtgaacaccaatgtggtcctgcggtatgatgggctgatcacctgggatgcaccggccatcaccaaaagctcctgtgtggtggatgtcacctacttcccttttgacaaccagcagtgcaacctgacttttggttcctggacctacaatggcaatcaggtggacatattcaacgccttggacagcggagatctctctgacttcattgaagatgtggaatgggaggtccatggcatgcccgctgtgaagaatgtgatctcctatggctgctgctctgagccttacccggatgtcacattcaccctccttctgaagaggaggtcctcgttctatatcgtcaacctcctcatcccatgcgtcctcatatcttttctggctcctctgagtttttatctcccagcagcctccggagaaaaggtctccctgggagtgaccatcctgttggccatgactgtatttcagctaatggtggcagaaatcatgccggcctcagaaaatgtgcccctgataggtgagtccaagtgtcttccacttcaagcccagctttgtagtgcctggggtcatgcctttaaggttgtgtgtgtgcctttaaacttgaaaaaatggagccaatttcgacacaatacagactgtctcaaatttttctggtggttgcagttagcatctttcaatatagatgagccttttgcaatcaaaactggtcttatggtctctgggtttacacgaaagagcaatgaaagacattatactttagagcagtagttctcaaagtggtggtccccagatgcacagcatcggcatcccctgggaacttatagaaacacaaaacctcagggcccaccggaagcctactgaatcagacattctggagataaggccctggcatcctgttttaacaaggcttatgggtgattctgatgcattttctgttgaagtctgaaatccactgacccagaggttaagacctgattttgaagtcaaagaaacttgcatttgaacgctgacttcactgctcactccttgatcaaacaggtaaatactacatagccacgatggccctgatcacagcctccactgtgttgaccatcatggtgatgaatatccacttctgtggggccgaggcccggccggtgccacactgggccagggtggtcatcctgaaatacatgtccagggtcttgtttgtctatgatgtgggtgaaagctgcctcagcccgcaccacagtagagagcgggaccacctcacgaaagtttatagcaaactcccagagtctaacctgaaagcagccaggaacaaagacctttccagaaagaaggacatgaacaaacgcttaaagaacgacctgggctgccagggtaagaaccctcaggaggccgagagttactgtgcacagtacaaagtgctgacgaggaatattgagtacatcgccaagtgcctcaaagaccacaaggccaccaattccaaggggagtgaatggaagaaggtggcgaaagtcatagaccgattcttcatgtggatttttttcattatggtgtttgtgatgactattttgatcatagcaagagcggattagtcacagatattggctttgctatctgggtagaaattaatacaattccctgtgatctattccaatgttcttccaagatttttgttcatctataatttaggggttatgttgtctgtgctttttatttttagcttcaaatgaatgtcgaagctatctgctctgttaaattaagcagaagatccaaaatttcaagggtaggaagatggaagaaatagggaaagagcccttttatagcccaccgtagtggtgggtgactggcctctagtttatataattatttacctctttggcagtacagataacaaaatacactttactggtaaaatttaaaacaaaaaaggcaaaacaaaacaaactcattttccccttagttcccattaaaatatgcatttgaaaaatgaaatagtcatatatatattagtgtgatttaagtctcaatggtaccttattcaggcatagtgcatttgaagtcatatctcaaatagtggaataaaaggttttgtcccatgtaaagaaagtctaagcatcagctgtttaatggggaaaagaactttcttcataatggtgatgtcgtatatgttggttatgttttatataaacccaaaagatgaagtcattcctgcatttaccctttgattaaaatatgatagatgaagctgttcctgcatttagtcttgtattaaaataaggtgattagcaagctgggctcatccattcattcattgaacttttcaccaaacatggatcacgttttttcctgcatgtaataaaagcaatatgattcacatttgaaaaaaaaaaaaaaaaaaaaaaaaaaaaaaaaaaaaaaaaaaaaaaaaaaa

SEQ ID NO: 231 - DNA, 2707 bp, Homo sapiens
ccacgcgtccggaaggagaagctcaaagcataacctccttagcttcatcctagatctacttgaaactacaatattaaccattcacttaaaagtcattaacaccataggaatgagtcctgggactaacagtgttgagtggtcatcctgaaccatattcctactggtttttttggtctctttttctctctgtctaggactttacaatgactttttatctcaggcattactggaaagacgagaggctctcctttcctagcacagcaaacaaaagcatgacatttgatcatagattgaccagaaagatctgggtgcctgatatcttttttgtccactctaaaagatccttcatccatgatacaactatggagaatatcatgctgcgcgtacaccctgatggaaacgtcctcctaagtctcaggataacggtttcggccatgtgctttatggatttcagcaggtttcctcttgacactcaaaattgttctcttgaactggaaagctatgcctacaatgaggatgacctaatgctatactggaaacacggaaacaagtccttaaatactgaagaacatatgtccctttctcagttcttcattgaagacttcagtgcatctagtggattagctttctatagcagcacaggttggtacaataggcttttcatcaactttgtgctaaggaggcatgttttcttctttgtgctgcaaacctatttcccagccatattgatggtgatgctttcatgggtttcattttggattgaccgaagagctgttcctgcaagagtttccctggatttctaggatgtacaatattgatgcagttcaagctatggcctttgatggttgttaccatgacagcgagattgacatggaccagacttccctctctctaaactcagaagacttcatgagaagaaaatcgatatgcagccccagcaccgattcatctcggataaagagaagaaaatccctaggaggacatgttggtagaatcattctggaaaacaaccatgtcattgacacctattctaggattttattccccattgtgtatattttatttaatttgttttactggggtgtatatgtatgaaggggaatttcaaatgtatacaactttaaagccagatgatgtttaaaaacaaaactcttgaatatgagttggatagtcctagatggaactgggaaagagcaagtcacctctcctgccctaatgaaaatttgaaagctgtctgatttacatctaagaaagagtttaggtcctagaaaagtttgactccataaataagagtcataggcatgtgtattatgggaaaaacagttttccattgggaagggctttataactacttcatctgaaccctccttctttcttaatgaaatgttctttatttaactagggaagaaagctggactataacaataattcaaagatattttgtttcttagtgccagccaagtgcctggttatctaccagagctcaaccgtcctaggcaagaacatccacatagaggtggtatcatccacactcacacagctgagaatcctatgaaggatctccaatctccttctccagtcaagtatttattcttatttaaatattgtttcaggccaggtgccgtggctcatgcttgttatcccagcactttgggaggccgaggtgtgcagatcatttgaggtcaggagttcaagaccagcctggccaacatggtgaaaccccgtctctactaaacatacaaaaattagcgggcatggtggcacacgcctgtagtctgtgctacttggggggctgaggcaggagaatcactttaacatgggaggcagaggttgcagtgagctgagattgagccactgcactctagcctgggcgacagagcgagacatcatctcaaaaaataaataaaataaaaatatatatatatatataaaatattgtttcatgtatttgtgagcataagtggagaggggaagctaaacttccacttattcttctcattctaatgttaaattaatacatcagtcatcaataataacatctcgcattttgtagatcatgtattgttttcacagctttttagaggtttttaattaatcactttgttcaacaaatgtttattgaccacctacgtgtgccaggcacttcactaagtgttatgtactgaaaaaatgaatatgaaatagctttcctgccttctctaagtgcatagccaacaggagcagtgaactggagctataaaacatgtgacgaatgttaaaacagaggtatgtacactgtctggtgtgaattctgaaagggggataccaaagaaaggaaaagaacatctccaaagggatgtggactctcaatttataaacaactggagatgcttccagatattgtattgagtgaaaaaactgaatgaaatgtatttatcccatagtaatccttaatatctttggtcgaaccaagtaaaccaggtcaagtgggtattaaataaatttttgttaagtaggaaaacctcctatgatcagtgttcattttgcagatcggcagtgtgcatgcttttgttttgagtattttctgaacaagattcaatttaaagaaaagcccttggcaggaaatatgaaatattccgatacctattttgattgctgggattgaattaagagaaataaattaaatggtgtattaaaaaaaaaaaaaaaaaaaaaaaaaaaaaaaaaa

SEQ ID NO: 232 - DNA, 484 bp, Homo sapiens
  SITE (419): n equals a,t,g, or c
  SITE (438): n equals a,t,g, or c
  SITE (478): n equals a,t,g, or c
gcttgtcgtgtggctctgtgtcgacactgtgcgccaccatggccgtgactgcctgtcagggcttggggttcgtggtttcactgattgggattgcgggcatcattgctgccacctgcatggaccagtggagcacccaagacttgtacaacaaccccgtaacagctgttttcaactaccaggggctgtggcgctcctgtgtccgagagagctctggcttcaccgagtgccggggctacttcaccctgctggggctgccagccatgctgmaggcagtgcgagccctgatgatcgtaggcatcgcctgggtgccattgcctcctggtatccatctttgcctgaaatgcatccgcattgcagcatggaggactctgccaaagcaacatgacactgacctycgggatcatggtcattggctcagnctttgagcaawtgctggantgctgtgttggcaacatgctggtgactaacttctggatgnccacag

SEQ ID NO: 233 - DNA, 990 bp, Homo sapiens
  SITE (713): n equals a,t,g, or c
ggtgagagtgaataaatatcaaaaatctgttgggtggagatacagtgatgaggaagaggatctcaggactgaactcaaccttctgaggaagtactctttccacaaaaacattgtgtccttctatggagcatttttcaagctgagtccccctggtcagcggcaccaactttggatggtgatggagttatgtgcagcaggttcggtcactgatgtagtgagaatgaccagtaatcagagtttaaaagaagattggattgcttatatctgccgagaaatccttcagccaaaagtcatatttctgggaacgggttgtagtgattccagcctaaagaaagaattgtgtctgaaacatcaaaattaagctgtttctcttatcaaaagtttttccaaaaatactaagaactgtaccagaaagaaagaaagaaagaaagaaagaaagaaatatatactgatgtggctttttaaaaaatatatacagggcttagctcaccttcacgcacaccgagtaattcaccgggacatcaaaggtcagaatgtgctgctgactcataatgctgaagtaaaactggttgattttggagtgagtgcccaggtgagcagaactaatggaagaaggaatagtttcattgggacaccatactggatggcacctgaggtgattgactgtgatgaggacccaagacgctcctatgattacagaagtgatgtgtggnctgtgggaattactgccattgaaatggctgaaggagcccctcctcttgtaaccttcaacccttggaagctctcttcgttattttgcgggaatctgctcccacagtcaaatccagcggatggtcccgtaagttccacaatttcatggaaaagtgtacgataaaaaatttcctgtttcgtcctacttctgcaaacatgcttcaacacccatttgttcgggatataaaaawtgaacgacatgttgttgagtcattaacaaggcatcttactggaatcatt

SEQ ID NO: 234 - DNA, 2107 bp, Homo sapiens
ggttatctttaaccgattaatttgatttagatcgcaatttgcgatttaaacacaaatctaattccttgatttaaaatactttcactctgttactatacgaaaacgttaattatcttgcccaaaaatcaggcaattattgccctgaaaacgtgcatttgcgcagcaatcatcaaatccatacccgacaaaaaccgtgcaaaataacaacaaatgttaacagatagcattaaatattgcacaaatgataaccgaatttgtgtttatcccgattttcgcgatcgcagccggagtggcgcaatccctgcaatacttaaatcggtatcatgtgatacgcgagcctccggagcatattttgaacaggttaccttcgagcgcatcggctttagcgtgcagcgcccacgccctgaatctcattgagaagcgaacgctggatcatgaggagatgaaagcacttaaccgagaggtgattgaatacttcaaagagcatgtcaatccggggtttttagagtatcgcaaatctgttaccgccggcggggattacggagccgtagagtggcaagcgggaagtttaaatacgcttgtcgacacccagggccaggagtttatcgactgcctgggaggttttggaattttcaacgtggggcaccgtaatccagttgtggtttccgccgtacagaatcaacttgcgacaatgtccagcgtgggcggtgagccatggggcttctccaaaacgtgttttttgttgttaattcggtgtagacttgtaaacctaaatcttttcaatttggtttacaagtcgattatgacaacggacgatcttgcctttgaccaacgccatatctggcacccatacacatccatgacctcccctctgccggtttatccggtggtgagcgccgaaggttgcgagctgattttgtctgacggcagacgcctggttgacggtatgtcgtcctggtgggcggcgatccacggctacaatcacccgcagcttaatgcggcgatgaagtcgcaaattgatgccatgtcgcatgtgatgtttggcggtatcacccatgcgccagccattgagctgtgccgcaaactggtggcgatgacgccgcaaccgctggagtgcgtttttctcgcggactccggttccgtagcggtggaagtggcgatgaaaatggcgttgcagtactggcaagccaaaggcgaagcgcgccagcgttttctgaccttccgcaatggttatcatggcgatacctttggcgcgatgtcggtgtgcgatccggataactcaatgcacagtctgtggaaaggctacctgccagaaaacctgtttgctcccgccccgcaaagccgcatggatggcgaatgggatgagcgcgatatggtgggctttgcccgcctgatggcggcgcatcgtcatgaaatcgcggcggtgatcattgagccgattgtccagggcgcaggcgggatgcgcatgtaccatccggaatggttaaaacgaatccgcaaaatatgcgatcgcgaaggtatcttgctgattgccgacgagatcgccactggatttggtcgtaccgggaaactgtttgcctgtgaacatgcagaaatcgcgccggacattttgtgcctcggtaaagccttaaccggcggcacaatgaccctttccgccacactcaccacgcgcgaggttgcagaaaccatcagtaacggtgaagccggttgctttatgcatgggccaacttttatgggcaatccgctggcctgcgcggcagcaaacgccagcctggcgattctcgaatctggcgactggcagcaacaggtggcggatattgaagtacagtgcgcgagcaacttgcccccgcccgtgatgccgaaatggttgccgatgtgcgcgtactgggggccattggcgtggtcgaaaccactcatccggtgaatatggcggcgctgcaaaaattctttgtcgaacagggtgtctggatccggccttttggcaaactgatttacctgatgccgccctatattattctcccgcaacagttgcagcgtctgaccgcagcggttaaccgcgcggtacaggatgaaacatttttttgccaataacgagaagtccgcgtga

SEQ ID NO: 235 - DNA, 1581 bp, Homo sapiens
ggcacgagcatcacaagcagtggccacgtggcccgtctcgagttccagactgaccactccacagggaagaggggcttcaacatcacttttaccaccttccgacacaacgagtgcccggatcctggcgttccagtaaatggcaaacggtttggggacagcctccagctgggcagctccatctccttcctctgtgatgaaggcttccttgggactcagggctcagagaccatcacctgcgtcctgaaggagggcagcgtggtctggaacagcgctgtgctgcggtgtgaagctccctgtggtggtcacctgacttcgcccagcggcaccatcctcgctccgggctggcctggcttctacaaggatgccttgagctgtgcctgggtgattgaggcccagccaggctaccccatcaaaatcaccttcgacaggtgcttgtgaccacagccttggggggagaggcaagggggagatttttacagagccagtgggagggaatgcagggtggataggggaccagtaccaacgctgaaagtcagcaaggttggagaacactggaccaaattgccctgggtggggcagacctcactggctctgcccttgggcttggtttgtgctgtttaggggactatggcaggaggggtgaagagaaggcttgggtaccatttgggatgttagagctcccccctccccagcccccaaggagggggagtgggcagatagacaccatcagatgttaaagcatgactctggtatctgacgagcattctcctggaaatgtccaacgtgggaaggcagccccccacctctgccccaaatcctgctcatgtgccccacttctagctcccaccctggctatgccccttgggtggagaacgtagccacctaaatgtgaaaacaaacttcttccggacaaagtgttcctggcctggaatagcagtctgcaaacttttgtgtgaagagccagatggtaaatattttaggctttgtgggccacttgcctacttgcatatctctgatgcatgctctgctttgcctttttttttttttaagatctctttacaaatgtaaaaagcatccttagctctccaggctatagaccagatctggccctgaggctttagtgtgctgacccctagcctagaatgttctgacctccatgaggctagtcattgtgcctctaggtcttaagctggctcacagatcaggccacagagaggatgagagcagtttccaaccatggaaggaggaggagggatgttaaatagagtggagaaggtccttctgcatcgctagtgaatgtgtgcaaattatattaaaagatcccagcctgccaaaatctggttattcggaagccctgggtcaggcagggctttatgtcatttgcaaattaataagcttggatttctcaagaaggcttcatttctgtcatttggcagattcaaaaccgaggtcaactatgacaccctggaagtacgcgatgggcggacttactcagcgcccttgatcggggtttaccacgggacccaggttccccctcgtgccgaattcgatatcaagcttatcgataccgtcgacctcaga

SEQ ID NO: 236 - DNA, 504 bp, Homo sapiens
  SITE (420): n equals a,t,g, or c
  SITE (470): n equals a,t,g, or c
  SITE (497): n equals a,t,g, or c
gcttttttaaagaaaactggtgatttatttgctatcaaagtatttaataacataagcttccttcgtccagtggatgttcaaatgagagaatttgaagtgttgaaaaaactcaatcacaaaaatattgtcaaattatttgctattgaagaggaggtaagtagtaaaacttcaatcttatatttattgtagttacgagtcaagaaatagaacctaatattaaaaaatggattttttaaaaaactgttgaaaattaggtttgtacaaccaaatactttatcctaaaggatycttgaatatatwgaacmatagaaataaaatatcmtwaaaatggaatcmgaaacagtagtgtaagaaataaaagggggcggccggctgcggctgggtgcagtggctcacgcctgtaatcccagcactttgggnagaccgaggcgggtagatccatgcggtcaagagattgagaccagcctggncaatgtggtgaggcccccgtctctacntaaaaat

SEQ ID NO: 237 - DNA, 873 bp, Homo sapiens
gcgcaaatcttctggcaaacgacgtggatttccattccttcccattcgtagcctttggtaaaggaatcatcaagaaatgtcgcacgagcccagacgcctttgtgcagctggccctccagctggcgcactacaaggacatgggcaagttttgcctcacatacgaggcctccatgacccggctcttccgagaggggaggacggagaccgtgcgctcctgcaccactgagtcatgcgacttcgtgcgggccatggtggacccggcccagacggtggaacagaggctgaagttgttcaagttggcgtctgagaagcatcagcatatgtatcgcctcgccatgaccggctctgggatcgatcgtcacctcttctgcctttacgtggtgtctaaatatctcgctgtggagtcccctttccttaaggaagttttatctgagccttggagattatcaacaagccagacccctcagcagcaagtggagctgtttgacttggagaataacccagagtacgtgtccagcggagggggctttggaccggttgctgatgacggctatggtgtgtcgtacatccttgtgggagagaacctcatcaatttccacatttcttccaagttctcttgccctgagacggggattataagtcaaggaccaagttcagatacttgagacaaagtggaaagtctcagcatatggaaacaaggccttggaggagaccatggacatcaccaagttcatgtgctgggctggaaagaaaagcctgttgattttcacttgctgtgcatttattcatccattccattgcctcaatgctgagaacagtgcctgacacataaaagatgctcaataaatatgttaaaagtaaaaaaaaaaaaaa

SEQ ID NO: 238 - DNA, 837 bp, Homo sapiens
gcaaatcctgggttgcwgcagagaaaatgtaccacactcatagacggcgaaggctggtccgaaaacgcaagaaagatttaacacagactgcttcaagcaccgcaagggccatggaggaattgcaagaccaagagggctgggaatatgcttctctaattggctggaaatttcactggaaacaacgtagttcagataccttycgccgcagacgctggaggagaaaaatggctccttcagaaacacatggtgcagctgccatctttaaacttgaaggtgcccttggggcagacactaccgaagatggggatgagaagagcctggagaaacagaagcacagtgccaccactgtgttcggagcaaacacccccattgtttcctgcaattttgacagagtctacatctaccatctgcgctgctatgtctatcaagccagaaacctcttggctttagataaggatagcttttcagatccatatgctcatatctgtttcctccatcggagcaaaaccactgagatcatccattcaaccctgaatcccacgtgggaccaaacaattatattcgatgaagttgaaatctatggggaacccaaacagttctacagaatccacccaaagktatcatggaactttttgacaatgaccaagtgggcaaagatgaatttttaggacgaagcattttctctcctgtggtgaactgaactcagaaatggacatcacacccaaacttctctggcacccagtaatgaatggagacaaagcctgcggggatgttcttgtaactgcagagctgattctgaggggcaaggatggctccaaycttcccattcttccccct

SEQ ID NO: 239 - DNA, 850 bp, Homo sapiens
  SITE (43): n equals a,t,g, or c
agatactggcccacttccgggacaggggtcaattctgcctganttatgagtcggccatgactcgcttattcctggaagaccggacggagacggtgcggtcttgcagaagggaggcctgcaactttgtcagggccatggaggacaaagagaagacggacccacagtgcctcgccctgttccgcgtggcagtggacaagcaccaggctctgctgaaggsasccatgagcgggcagggagttgaccgccacctgtttgcgctgtacatcgtgtcccgattcctccacctgcagtcgcccttcctgacccaggtccattcggagcagtggcagctgtccaccagccagatccctgttcagcaaatgcatctgtttgacgtccacaattacccggactatgtttcctcaggcggtggattcgggcctgctgatgaccatggttatggtgtttcttatatcttcatgggggatggcatgatcaccttccacatctccagcaaaaaatcaagcacaaaaacggattcccacaggctggggcagcacattgaggacgcactgctggatgtggcctccctgttccaggcgggacagcattttaagcgccggttcagagggtcagggaaggagaactccaggcacaggtgtggatttctctcccgccagactggggcctccaaggcctcaatgacatccaccgacttctgactccttccagcaggcagctggcctctccaaggaataagggtgaaattgccacagctggctgacacaggacaggggcaactggtttggcaaccccacatccaggccaataaagatgtgtgagctgggaaaaaaaaaaaaaaaaaaaaaaa

SEQ ID NO: 240 - DNA, 580 bp, Homo sapiens
atctctgtcctgcacatgtgatgggctcctgtcctcaggtccatttggagcagtggcagctgtccaccagccagatccctgttcagmaaatgcatctgtttgacgtccacaattacccggactatgtttcctcaggcggtggattcgggcctgctgatgaccatggttatggtgtttcttatatcttcatgggggatggcatgatcaccttccacatctccagcaaaaaatcaagcacaaaaacggattcccacaggctggggcagcacattgaggacgcactgctggatgtggcctccctgttccaggcgggacagcattttaagcgccggttcagagggtcagggaaggagaactccaggcacaggtgtggatttctctcccgccagactggggcctccaaggcctcaatgacatccaccgacttctgactccttccagcaggcagctggcctctccaaggaataagggtgaaattgccacagctggctgacacaggacaggggcaactggtttggcaaccccacatccaggccaataaagatgtgtgagctgggaaaaaaaaaaaaaaaaaaaaaaa

SEQ ID NO: 241 - DNA, 2169 bp, Homo sapiens
cccagggggcctccgaaggccattcaggccccaagccctacccacgcctcccagcctgggagaaaggggaaccagagcggagaggccgcagtgcgacgggcagagccaaggagccactctcccgggcaacagagaccggagaggccagagggcaggacggctctgggcggaggggcccccagaagagaggtgtccgagtcctcaggccaagcactgcagagctagtccctgcgaggagcccctcagaaacactggcttaccagcacctacccgtcaggatctttgtggctctgtttgactatgaccccgtgtcaatgtcgcccaatcctgatgctggagaagaagagcttcccttccgagagggtcagatcctgaaggtgtttggggacaaggatgccgatggcttctaccagggcgaaggtgggggccggacaggctacattccctgcaacatggtggctgaggtggctgtggacagccctgctgggagacagcaactgctccagcggggttatttgtccccagatattctccttgagggctcagggaatggtccgtttgtgtactccacagcccacacaactgggcctcctcccaagccccgccgctccaagaaagctgagtcggaaggccctgcccagccctgtccaggcccccctaagctggtcccctctgctgacctgaaagctccccactccatggtgggtgcatttgactacaacccccaggagagttcccccaatatggacgtggaggcagagctgcccttccgggcaggggatgtcattactgtgtttgggggcatggacgatgacggtttctactatggggaattaaatggacaaaggggcctggttccatccaacttcctggagggccctgggcctgaggcaggcggcctggacagggaacccaggacaccccaggctgagagtcaggactggggctgcaccacacaagggtccccagggcccccaggtgggccttgtacccccagctctggcagcgcccccaggattgaacgtggggagccccagggcagaagcgagaaggtgtggggtttcttctccaaggggaagcagctcctcaggaggctgggctctgggaagaaggagtgaagctgtggcccatcctgcaggcagaagaggccctgagaggcccccagatcactgtctctgctgagcagggaaggctcagactgggcccagagcccccgttcttctgcgttaacactgtggcattcagagggaatcaaagagccttggtgaaggtcagagctaaatggctccttaaggatgaactctctagagaagcaccttcctcctacaggaggggaaactgagcccacagtgagtatgtaacttgaccaaggtcactgagccaggactggacccaggaccctcgcgtcctggtccacccacctcgtctactagtgtcccacagtgctgcgctagtcccttctgccacccttcccagtcccaggacgggccctggagggagaaaggagcctgtgccccctgatggctctggctgtcctgatcctgtcttccctcccctgaaggaaagtttgcactggattttattggagccccatctccccagcgggcaggcgggcggagcctgtatatatgtatatactcagtgcctcagttcagcttcctccacctcgcttccactgcacaggcccaggaaggagaaaggccaagccaaagtgggccccaccctgcccccgtcgtgctccatccttccctgccggggcctgctggcccctgtaaggtcccgcccccaaagaccctggggccagcggggccgaaagcggagttgggtttgccttattttgctcattggattcaagttcttttgcatagttttcttctaacccctgttggagtccaggggctggagaaaaggacagatttatgcagctattttcatacattccctgttcagagtggggtaggggttctccgccgttacccgatccactccatcccccaccctctgaggggtgagtgtgtctttgcatgtttcctttgctgtggtggaaaatagtttgactgaacccccaccttgaccttggtctccaggggtgtggaatggtgggggaatttgtttaaaaagacattttattataataaagtctattttcacaaaaaaaaaaaaaaaaaa

SEQ ID NO: 242 - DNA, 1333 bp, Homo sapiens
  SITE (1186): n equals a,t,g, or c
  SITE (1226): n equals a,t,g, or c
  SITE (1232): n equals a,t,g, or c
  SITE (1237): n equals a,t,g, or c
  SITE (1300): n equals a,t,g, or c
  SITE (1328): n equals a,t,g, or c
tgcaggaattcggcacgagccggccagggccatgtcctgagccccctgggcgtgcctcctggaacagacatgcccgccagccagcccattgacatcccggacgccaagaagaggggcaagaagaagaagcgcggccgggccaccgacagcttctcgggcaggtttgaagacgtctaccagctgcaggaagatgtgctgggggagggcgctcatgcccgagtgcagacctgcatcaacctgatcaccagccaggagtacgccgtcaagatcattgagaagcagccaggccacattcggagcagggttttcagggaggtggagatgctgtaccagtgccagggacacaggaacgtcctagagctgattgagttcttcgaggaggaggaccgcttctacctggtgtttgagaagatgcggggaggctccatcctgagccacatccacaagcgccggcacttcaacgagctggaggccagcgtggtggtgcaggacgtggccagcgccttggactttctgcataacaaaggcatcgcccacagggacctaaagccggaaaacatcctctgtgagcaccccaaccaggtctcccccgtgaagatctgtgacttcgacctgggcagcggcatcaaactcaacggggactgctcccctatctccaccccggagctgctcactccgtgcggctcggcggagtacatggccccggaggtagtggaggccttcagcgaggaggctagcatctacgacaagcgctgcgacctgtggagcctgggcgtcatcttgtatatcctactcagcggctacccgcccttcgtgggccgctgtggcagcgactgcggctgggaccgcggcgaggcctgccctgcctgccagaacatgctgtttgagagcatccaggagggcaagtacgagttccccgacaaggactgggcccacatctcctgcgctgccaaagacctcatctccaagctgctggtccgtgacgccaagcagaggctgagtgccgcccaagtcctgcagcacccctgggttcaggggtgcgccccggagaacaccttgcccactcccatggtcctgcagaggaacagctgtgccaaagacctcacgtccttcgcggctgaggccattgccatgaaccggcagctggcccagcacgacgaggacctgctgagaggaggccgcaggngcaaggccagcccgtcctggtccgagctacctcacgctgnctgcancttgncttccaaccttccaagtcccaaagcttggcgcaacgggcggcaaaaagggcccaagtccttgncctttgggcccccaatgggtcccttggntgggg

SEQ ID NO: 243 - DNA, 637 bp, Homo sapiens
  SITE (637): n equals a,t,g, or c
ggcgggagcccgccggcggtggcgcggcggagacccggctggtataacaagaggattgcctgatccagccaagatgcagagcacttctaatcatctgtggcttttatctgatattttaggccaaggagctactgcaaatgtctttcgtggaagacataagaaaactggtgatttatttgctatcaaagtatttaataacataagcttccttcgtccagtggatgttcaaatgagagaatttgaagtgttgaaaaaactcaatcacaaaaatattgtcaaattatttgctattgaagaggagacaacaacaagacataaagtacttattatggaattttgtccatgtgggagtttatacactgttttagaagaaccttctaatgcctatggactaccagaatctgaattcttaattgttttgcgagatgtggtgggtggaatgaatcatctacgagagaatggtatagtgcaccgtgatatcaagccaggaaatatcatgcgtgttataggggaagatggacagtctgtgtacaaactcacagattttggtgcagctagagaattagaagatgatgagcagtttgtttctctgtatggcacagaagaatatttgcaccctgatatgtatgagagagcn

SEQ ID NO: 244 - DNA, 552 bp, Homo sapiens
ctggaagagtaccaggccctgaccttcctgaccagaaatgaaattctgtgcatccatgacaccttcctgaagctctgccctcctgggaagtactacaaggaggcaacgctcaccatggaccaggtcagctccctgccagctctgcgggtcaaccctttcagagaccgtatctgcagagtgttctcccacaaaggcatgttctcctttgaggatgtgctgggcatggcatctgtgttcagcgagcaggcctgcccaagcctgaagattgagtatgcctttcgcatctatgattttaatgagaatggcttcattgatgaggaggatctgcagaggatcatcctgcgactgctgaacagtgatgacatgtctgaggacctcctgatggacctcacgaaccacgtcctgagtgagtcggatctggacaatgacaacatgctgtccttctcagagtttgaacatgcaatggccaagtctccagatttcatgaactcctttcggattcgcttctggggatgctgatgtagcggcaaatacctgacatggcagcctcga

SEQ ID NO: 245 - DNA, 511 bp, Homo sapiens
  SITE (497): n equals a,t,g, or c
aattcggcacaggtagatcgtagccatcaagatcctgaagaacacccatcctatgcccgacaaggtcagattgaagtgagcatcctggcccggttgagcacggagagtgccgatgactataacttcgtccgggcctacgaatgcttccagcacaagaaccacacgtgcttggtcttcgagatgttggagcagaacctctatgactttctgaagcaaaacaagtttagccccttgcccctcaaatacattcgcccagttctccagcaggtagccacagccctgatgaaactcaaaagcctaggtcttatccacgctgacctcaaaccagaaaacatcatgctggtggatccatctagacaaccatacagagtcaaggtcatcgactttggttcagccagccamgkctycaaggctgtgtkctycacctacttgcagtccagatattacagggccctgagatcatcttggtttaccattttgtgagcaattgacatgtngtccctgggctgtt

SEQ ID NO: 246 - DNA, 1735 bp, Homo sapiens
tcgacccacgcgtccgccacttaacagccacttgtttcatcccacctgggcattaggttgacttcaaagatgcctcagttactgcaaaacattaatgggatcatcgaggccttcaggcgctatgcaaggacggagggcaactgcacagcgctcacccgaggggagctgaaaagactcttggagcaagagtttgccgatgtgattgtgaaaccccacgatccagcaactgtggatgaggtcctgcgtctgctggatgaagaccacacagggactgtggaattcaaggaattcctggtcttagtgtttaaagttgcccaggcctgtttcaagacactgagcgagagtgctgagggagcctgcggctctcaagagtctggaagcctccactctggggcctcgcaggagctgggcgaaggacagagaagtggcactgaagtgggaagggcggggaaagggcagcattatgaggggagcagccacagacagagccagcagggttccagagggcagaacaggcctggggttcagacccagggtcaggccactggctctgcgtgggtcagcagctatgacaggcaagctgagtcccagagccaggaaagaataagcccgcagatacaactctctgggcagacagagcagacccagaaagctggagaaggcaagaggaatcagacaacagagatgaggccagagagacagccacagaccagggaacaggacagagcccaccagacaggtgagactgtgactggatctggaactcagacccaggcaggtgccacccagactgtggagcaggacagcagccaccagacaggaagaaccagcaagcagacacaggaggccaccaatgaccagaacagagggactgagacccacggtcaaggcaggagccagaccagccaggctgtgacaggaggacatgctcagatacaggcagggacacacacccagacacccacccagaccgtggagcaggacagcagccaccagacaggaagcaccagcacccagacacaggaggactgaatccacgaccatgcaggaagtcagaccagaccggctggaccaggaggacatgctccaatgcactgagtcacaaacgcaggagacgtgagcagcactcacccaaggcgctgtgtgacagaagggcagggagacagacagcccacagtggttggtgaggaatgggttgatgaccactcaagggagacagtgatcctcaggctggaccagggcaacttgcataccagtgtttcctcagcacagggccaggatgcagcccagtcagaagagaagcgaggcatcacagctagagagctgtattcctacttgagaagcaccaagccatgacttccccgactccaatgtccagtactggaagaagacagctggagagagtttggcttgtcctgcatggccaatccagtgggtgcatccctggacatcagctcttcattatgcagcttcccttttaggtctttctcaatgagataatttctgcaaggagctttctatcctgaactcttctttctacctgctttgcggtgcagaccctctcaggagcaggaagactcagagcaagtcacccctttgtactgaattgtcctcatcttgtggggggtttcaggactatttttatctctgacatctctctattgccccatctaccctaatgcatcaataaaaccttaagccactgaaaaaaaaaaaaaaaaaaaaaaaaaaaaaa

SEQ ID NO: 247 - DNA, 1075 bp, Homo sapiens
ccctgctcccctctccgaccctttgagccgtggccgttgccagatgtccacaatgggaaacgaggccagttacccggcggagatgtgctcccactttgacaatgatgaaattaaaaggctgggcaggaggtttaagaagttggacttggacaaatcagggtctctgagcgtggaggagttcatgtccctgccggagctgcgccacaacccgttggtgcggcgagtgatcgacgtcttcgacaccgacggtgatggagaagtggacttcaaggaattcatcctggggacctcccagttcagcgtcaagggcgacgaggagcagaagttgaggtttgcgttcagcatttacgacatggataaagatggctacatttccaacggggagctcttccaggtgctgaagatgatggtgggcaacaacctgacggactggcagctccagcagctggtcgacaaaaccatcatcatcctggacaaggatggcgatgggaagatatcctttgaggaattcagtgctgtggtcagagacctggagatccacaagaagctggtcctcatcgtatgagcctttttcttacaagcaccacccaacaacttctgctttcttccctatctctttcaagatttgctcaagacgtccaactgtctctctgacttatctggaagtatttctttttgtgaagccatatgtcctaacaggagcttcatcaccaactcagtgctattaattctccttctctgaatgactcagggtaccctatagggggaagagcaagtcaaatgagcatagtggggaaagaaaaggaaatggcttttataaacatcttttactttgttttgattcaaagaccaaactagaactttaaaagttcaaaaataagaaagtatacatttttgctgttatttctcatcattttgtatatgggaggaaatttataatttgcatgggtgttaggtgaactgttttcatttgcttgtgttcagatatcttgccagattgttaacttcctattgtagcaacagggacaaatatatttgtctttgctgggcaaaaaaaaaaaaaaaaaaaaaaaaa

SEQ ID NO: 248 - DNA, 1367 bp, Homo sapiens
ggcacgagtttgccttctttgccgtggagatggtggtgaagatggtggccttgggcatctttgggaaaaagtgttacctgggagacacttggaaccggcttgactttttcatcgtcatcgcagggatgctggagtactcgctggacctgcagaacgtcagcttctcagctgtcaggacagtccgtgtgctgcgaccgctcagggccattaaccgggtgcccagcatgcgcatccttgtcacgttgctgctggatacgctgcccatgctgggcaacgtcctgctgctctgcttcttcgtcttcttcatcttcggcatcgtcggcgtccagctgtgggcagggctgcttcggaaccgatgcttcctacctgagaatttcagcctccccctgagcgtggacctggagcgctattaccagacagagaacgaggatgagagccccttcatctgctcccagccacgcgagaacggcatgcggtcctgcagaagcgtgcccacgctgcgcggggacgggggcggtggcccaccttgcggtctggactatgaggcctacaacagctccagcaacaccacctgtgtcaactggaaccagtactacaccaactgctcagcgggggagcacaaccccttcaagggcgccatcaactttgacaacattggctatgcctggatcgccatcttccaggtcatcacgctggagggctgggtcgacatcatgtactttgtgatggatgctcattccttctacaatttcatctacttcatcctcctcatcatcgtgagtgactcctcagatccccgtggggatgggcgatcctggggacacctgtgggggcagtccagagaggggatagtttgctctgtctgaagtttttagctctcaggacaagtcctgtagagagggcatccatcatatagtaggagggacaccagatgcagagtcaggaggaaatccaaggtcaaggcgggacttaactgctattgggaccttgggcaagtcattctccatgaggcctccagcactgctctgggcctctgtttcttcatgggtaaaatgaatggttctcaacctgagatgataccacctctcccagagggcatttggaaatgggaaagggtgattctggttttgattttttttaatagctttattgagacataactcacatatcattcaattcatccctttgaatgaatccagtggttttttaagcatgtttacagagttctgtttttttgtaaggacaaggggagtgcaattggcaatttgttactgggggaggggagagaagctaaacatcctgaaatgcttgcaaataaagaattattctacccaaaaaaaaaaaaaaaaaaaaaaaaaaaaaaaaaa

SEQ ID NO: 249 - DNA, 2991 bp, Homo sapiens
gaaagaggagtcatggcacatccacttcttcgagtacgggcgtggcgtgtgcatgtaccgcacagccaagacgcgggcactggtcctgaagggtatccctgagagcctccggggagagctgtggctcctcttctccggggcctggaatgagatggtgactcaccccgggtactatgctgagctggtggagaagtccaccgggaagtacagcctggccacagaggagatcgagcgagacctgcaccgctccatgcccgagcaccctgccttccagaacgagctggggattgctgccctccggcgggtgctgactgcctatgccttccgaaaccccaccatcggctactgccaggcaatgaacatcgtgacctcggtgctcctgctctatggcagtgaggaggaggccttctggctcctggtggccctgtgcgagcgcatgctgcccgactactacaacaccagggtggtgggagccctggtggaccaaggcatcttcgaagagctcacgagagacttcctgccgcagctctcggagaagatgcaggacctgggggtgatctccagcatctcgctgtcctggttcctgaccctcttcctcagcgtcatgcccttcgagagcgccgtggtcatcgtcgactgctttttctatgagggcatcaaggtgatcctgcaggtggccctggccgtcctggacgccaacatggagcagctgctgggctgcagcgacgagggcgaggccatgaccatgctgggcagatacctggataatgtggtcaacaagcagagtgtctctcctcctatcccgcacctccgtgccttgctgagcagcagcgatgacccccctgcagaggtggacatctttgagctcctgaaagtgtcctatgagaaattcagcagcctgagggccgaagacattgagcagatgcggtttaaacagaggctgaaagtgatccagtccttggaggacacggccaagaggagtgtggtccgagctatacctgtggacattggtttctccattgaagagctggaggacctttacatggtgtttaaggccaagcacctggctagccagtactgggggtgcagccgcacaatggccggccgtcgggaccccagcctgccctacctggagcagtaccggattgatgccagccagttccgggaactctttgccagcctgacaccctgggcctgtggctcccacacacctctgctggcagggcgcatgttcaggctcctggacgaaaacaaggactcgctgatcaacttcaaggagttcgtgacagggatgagcgggatgtaccacggggacctgacagagaagctcaaggtgctctacaagctacaccttcccccagctctgagcccagaggaagccgagtcagccctggaggcggcccattatttcacagaggacagctcctcagaagaagcactaccacaggaagagcaagaaggaagtggaagtgaggagagaggagaggagaaggggaccagctctccggactatcggcactaccttcgaatgtgggccaaggagaaagaggctcagaaggagacgattaaggatcttcccaagatgaaccaggagcagttcattgagctgtgcaagacgctttacaacatgttcagtgaagaccccatggagcaggacctgtaccacgccatcgccaccgtggccagcctcctgctccgcatcggagaggtggggaagaagttctcagcccgcacaggcaggaagcccagggactgtgccactgaggaggacgagccaccagcacccgaactgcatcaggacgcagccagggagcttcagcccccagctgcaggagacccccaagccaaagcaggcggagacacacacctcggaacagccccacaggagagccaggtggtggtggaggggggcagcggcgagggacagggctcaccctcccagctgctgtctgacgatgaaaccaaagacgacatgtccatgtcctcctactcggtggtcagcacgggctccctgcaatgtgaagaccttgcagacgacacggtgctggtgggcggggaggcctgcagccccacagcgcgcatcggcggcaccgtcgacaccgactggtgcatctcctttgagcagatcctggcctccatcctgacggagtccgtgctggtgaacttctttgagaagagagtggacattggactcaagatcaaggaccaaaagaaagtggagagacagttcagcaccgccagtgaccatgagcagcctggagtttccggctgatgcctgcagctgtgaggcctggcccaaggtgtcatcagtggggctggcctcatctcctcctgcctttcctcccttatcagtttctctttaaaggtgtgcccctcctgctctcccaggagcagtgagttgtgagtggaaagaaggctggtgcagacccagctgccttagacagattccctgggcctgcatctcctggcgccggctgcttctgggcccaggaagaggctgtggctcccaccttccttacacctggtgggagcccgcctcgcaccagctgcacctgcctagcattacaggctctcagatctgcccttgcttgcctcatacctctgtgctccacactgcggccaggccagctgagtccctccatccgtggatgctttcctgcagctatgtggtatgggggtcattcctgcctcttggcaccaggttggggggcatgtgcttgttgggcaccaaagtgatggaaccctcaggtgctctccgggagcctgaacctcctgactgaggaacatgggcagaacatgtttattgcacagagtgggcgtgcgcacaggcgtggctgtacacgtgctctcagctcatcatcctttccagtaactttaaaaaaacatccctcaggtcctgatatatttccttggattcatttcacttggctagaaattacactgtgctcaatgccttaataaatccctgaaagaaataaaaaaaaaaaaaaa

SEQ ID NO: 250 - DNA, 766 bp, Homo sapiens
ggcacgaggctaggacccctaggttctgcccctgcaggccccgccgtctcttctagccgcaccccatccgggtctgcagaccccaccctcctgaggcccctttccattagcccctgctccacgataagcccgcctctcgcaggtcccaccctctcccgacgaccttccgagccgcgggttactcgccctgtccctcaagtacgtccccgccggctccgagggcgcaggactgcccccgagcggggagctgcacttctgggtgaaggaggctcgggacctcctgccgctgcgggcaggatccctggacacttacgtacaatgcttcgtgctgcctgatgacagccgggccagccgccagcgtacaagggttgtgcgacgcagcctcagccctgtgttcaatcacaccatggtgtacgatggctttgggcctgctgacctgcgccaggcttgtgccgagctctccctctgggaccatggggccctggccaaccgccagctgggaggcacacgcctcagcctgggcaccggcagcagctatgggctgcaggtgccctggatggattccacacctgaggagaagcagctgtggcaagccctcctggagcagccgtgcgagtgggtggatggccttctacccctcagaaccaacctggcccccaggacgtagccccaccaagcctctctctctggacccccatctcagggcctgcccttggctaaagtcaataaagtctattctaagagcaaaaaaaaaaaaaaaaaaaaa

SEQ ID NO: 251 - DNA, 795 bp, Homo sapiens
  SITE (579): n equals a,t,g, or c
  SITE (787): n equals a,t,g, or c
gctggggaaggtgcagggggcctgggagactgcctctccgaagcggtgaaaccctcacccttccgtccctcccagccaccctccctaaaacttcccctgacagagggtggcagccccaggctctttgcataatcctgtggcttcgctgtcttcacccagcaccagcggacagggaagggcagagaaggccaccatggcgacactcctctcccatccgcagcagcgccctcccttcttgcgccaggccatcaagataaggcgccgcagagtcagagatctacaggatcccccgccccaaatggccccggagatccagcctccatcccaccacttctcccccgagcagcgggccctgctctacgaggacgcactctacactgtcttgcaccgcctgggtcatcctgagcccaaccatgtgacggaggcctctgagctgctgcgatacctgcaggaggccttccacgtggagcccgaggagcaccagcagacactgcagcgggtcagggagcttgagaagccaatattttgtctgaaggcaacagtgaaacaggccaagggcattctgggcaaagatgtcantgggttcagcgacccctactgcctgctgggcattgagcagggggtaagtgtgccarggggcagccccgggtcccggcatcgcagaaggctgtkgtgargcacaccatccccgaggaggagacccaacgsamgcargtyatyamccagacactcaacccgtctgggacgagaccttcatcctggagtttgaggacatcaccaatgcganctttcatc

SEQ ID NO: 252 - DNA, 1144 bp, Homo sapiens
gggtcgacccacgcgtccgatgagaaaaaaaggcaaaagaaaaaaagctacaagaattcaggtgttatcagtgtgaaacagtgtgagattacagtagaatgcacattccttgactatataatgggaggatgtcagctgaattttactgtgggagtggacttcactggctccaatggtgacccaaggtctccagactcccttcattacatcagccccaatggcgttaatgagtatttgactgctctctggtctgtgggactggtcattcaagattatgatgctgataagatgtttccagcttttggttttggcgctcagatacctcctcagtggcaggtatcacatgaatttccaatgaacttcaacccatccaatccctactgcaatggaatccaaggcattgtagaggcgtatcggtcttgtcttcctcagataaaactctatggaccaactaatttttctccaatcataaatcacgtggccaggtttgctgctgcagccacgcaacagcagacagcttctcaatattttgtgcttttgattattactgatggtgtgatcacagacctgatgaaaccagacaagctatagttaatgcctccaggctgcctatgtccatcataattgttggagttggaggtgctgacttcagcgccatggagtttctggatggtgatggtggaagtctccgctccccattgggcgaagtggccatcagagatattgtccagtttgtgcctttcagacagttccagaatgctccaaaagaaccacttgctcagtgtgtcttggcagagattccccagcaggtggtgggctacttcaatacatacaaactccttcctcccaagaacccagccacgaaacaacagaagcagtgaccacttcaacagaattcttttgtgttatgtggagcaatgccatctctcaccccaaatcgtgtatctgtcattctacgtactttttacccccagcatttatgatgtaaatctctttctctatggattatatctgtttaaagcattctttctaggttattttggggggacagtgccaagtccatctttgcccagtcaattcagtgattgatagcaatttacattaattgcagtaaagctctttggattagaaaaaaaaaaaaaaa

SEQ ID NO: 253 - DNA, 807 bp, Homo sapiens
  SITE (55): n equals a,t,g, or c
  SITE (684): n equals a,t,g, or c
  SITE (703): n equals a,t,g, or c
  SITE (708): n equals a,t,g, or c
  SITE (757): n equals a,t,g, or c
  SITE (771): n equals a,t,g, or c
  SITE (775): n equals a,t,g, or c
  SITE (803): n equals a,t,g, or c
gggccccatcccccgggctgcaggtccttcttccccctcctgacctacttcttcntggggggtgttcaccagatggtgccaggtacctttgccgttatcagcatcctggtgggtaacatctgtctgcagctggccccagagtcgaaattccaggtcttcaacaatgccaccaatgagagctatgtggacacagcagccatggaggctgagaggctgcacgtgtcagctacgctagcctgcctcaccgycatcatccagatgggtctgggcttcatgcagtttggctttgtggccatctacctctccgagtccttcatccggggcttcatgacggccgccggcctgcagatcctgatttcggtgctcaagtacatcttcggtgctggccaagagccaacacattcttggcccaggagcattgcttttctgtgaattcattatgccatctggctgccaatggaactcaaaacttggaaggcgaaggacaatgttatctgggattcaccgtgcccagcacccgaagtgccaaattccaggaggacaagagccttagccaatgacaactcactctcccctactccaccttctttcaagtccagctcagcccaggaggtgggagaaggtcacagagcctcagggaattttcaagtcagagtccccttttgaaccaagtattctaagatnccctgaggacttgatgaantgatnccttacccccccaaggtaattatttaaccccccagaaccaagcctcaanaacttgaaaggggnattngttggaccccaatgaacctggaagtttnaggg

SEQ ID NO: 254 - DNA, 555 bp, Homo sapiens
  SITE (393): n equals a,t,g, or c
ggtaaagcttgccagagcccagctgccttcccggtgtatacccttgggatttctaggcaggtcccctggaaggcacctgctaggcactgtctcagctgttctaggacaaaggtgagcctcctccctgccccatctcctgcaggcagtgagctctgcagccccagcccaggttctggcagcttcggggaggaaccacctgccccccagtacacagggcctttctgtggccgggcacgagtccacaccgacttcactcccagcccctatgaccacgactcgctgaaactgcaggtaagatcagcatccgggcttctctggagcctggcaggctgtgcccaaaaaggaagctggactgaaccaggctatgacagtgtcagtggaggccaaggcccnccatatcctctctcccttgctcccttctcctctcctctcccccaacagaaaggagatgtgatccagatcattgaaaagccacctgtgggcacgtggctgggcctactcaatggcaaggtgggctctttcaaattcatctatgtggatgtgctgcccgaggag

SEQ ID NO: 255 - DNA, 580 bp, Homo sapiens
  SITE (66): n equals a,t,g, or c
  SITE (94): n equals a,t,g, or c
  SITE (507): n equals a,t,g, or c
  SITE (508): n equals a,t,g, or c
  SITE (557): n equals a,t,g, or c
  SITE (574): n equals a,t,g, or c
gtgactctgacagcggcagaggccctaaagctttttaagaaccagctgtctccatatgaacaaagnggaatcctgggctacgcggagctgtggntcctgggtcttgaagccaagaagctcgacacggctcctgagaaatttagcaagacgagttttgatgatgagcatggcttctatctgaaggttctgcatgatcacattgcctaccgctatgaagttctggagacaatcgggaaggggtcctttggacaggtggccaagtgcttggatcacaaaaacaatgagctggtggccctgaaaatcatcaggaacaagaagaggtttcaccagcaggccctgatggagctgaagatcctggaagctctcagaaagaaggacaaagacaacacctacaatgtggtgcatatgaaggactttttctactttcgcaatcattctgcatcacctttgagctcctggggatcaattgtatgagttgatgaagattaacaattttcaaggtttcanntgttccttagttcggcgttcatctctctgttttgaagtgtttgccagangtttccgtaggggaaancattca

SEQ ID NO: 256 - DNA, 2004 bp, Homo sapiens
ggcacgaggtggctgctccggcccttccgcctccagctcggccatggggtcgcgcagctcccacgccgcggtcattcccgacggggacagtattcggcgagagaccggcttctcccaagccagcctgctccgcctgcaccaccggttccgggcactggacaggaataagaagggctacctgagccgcatggatctccagcagataggggcgctcgccgtgaaccccctgggagaccgaattatagaaagcttcttccccgatgggagccagcgagtggatttcccaggctttgtcagggtcttggctcattttcgccctgtagaagatgaggacacagaaacccaagaccccaagaaacctgaacctctcaacagcagaaggaacaaacttcactatgcatttcagctctatgacctggatcgcgatgggaagatctccaggcatgagatgctgcaggttctccgtctgatggttggggtacaggtgacagaagagcagctggagaacatcgctgaccgcacggtgcaggaggctgatgaagatggggatggggctgtgtccttcgtggagttcaccaagtccttagagaagatggacgttgagcaaaaaatgagcatccggatcctgaagtgactccgtttgtgccttgggcttgctcctgcaaccagtatctccttggaattcatccaaagcccccatggacgcatggacgcagggcgacaataaactgtattttcgtttctaactctatttagggccaagagaagaaagctggaaggatgtgtactaaagtctagctcagcagtccccaacctttttggcatcagggacagtttttccacggatgggtgacaggggatggttttgggatgattcaagtgcattacatttattgtgcactttatttctattatgattacattgtaatatataatgaaataattatacaactcaccataatgtagaatcagcaggagccctgagcttgttttcctgcaattagacggtcccatatgggagtgatgggagacagtgacagatcatcaggcattagattctcataaggagtgcacaatctagatcctttggtgtgcagttcacagtaggatttgggctcctatgataatctaatgccactgctgatctgacaggaggcagagctcaggcggtaatgcaagcaatggggagtggctgtaaatatagatgaagcttcagctcgcctgccgctcaccttgtgctgtgcagcccggttcctaacagaccacagaccccacaccaggtctatctcatttggtctcagagctgtgaatcagccagcaatattttagttgcaaatcactgaaaacccaactcaaagtgacttaagtcagaaagaaattttatgaattcaggtaattaaaaagtccagaagtatctgcctttaggcacagctggatccaagggcacaaatgatgtcatcaggctccagttattctccatctcccagctcagctttttctgtctgtaagcctgattttcaggaaggctctttcctagtgatggagatgaccaccatcagctccaggcttctatcctgctaacccagtaacccagtgggaagagatttacttattccaataattccaagtggagagtgtcattgacccgtttggggtctcatctctacttctaggggaatgaaacactctgagtggccaggcctgtgtcatgtgctaattcctagagccagggaaataaggtctgaggattcaggatggggtgaaaggtggttgcttaaaggaaaatgaaatacaattagcagaataaggggaaacgagtggtctgctctgctcgggcaaaacaagagatgcccattactgtgagggacccttgaagtctggactcttaaatgggtttttgctgatttcctgggtgcatgctaggatgatggggcttgatgcagtagggaagagacgatgtaaaaataataaacaatatataccttcaaaaaaaaaaaaaaaaaa

SEQ ID NO: 257 - DNA, 601 bp, Homo sapiens
  SITE (601): n equals a,t,g, or c
gacgaattcgtgctgcgcctagaaggggttatcgagaaggtgaactgggaccaagatcccaagccggctctggtgactaaattcatggagaacggctccttgtcggggctgctgcagtcccagtgccctcggccctggccgctcctttgccgcctgctgaaagaagtggtgcttgggatgttttacctgcacgaccagaacccggtgctcctgcaccgggacctcaagccatccaacgtcctgctggacccagagctgcacgtcaaggtcagctggtctacacccctctcagcctcaagacaaggccccagagctgctctagccaggcccgccggacactagacctccagagccctgtctattgaataggcgtagcctctctctctggacacagggctgccaggggacaaagcccagccaggagttttagctcctgcctaccaggtgatagaggccctgagccacacgagtcatttccaccagctgccccaccagcccctccaaagagtcatggctgacccagccctggagactcagaccttgacctagccctaccacaaggcacctagatctaccwtccaagggaaccctttttcccttn

SEQ ID NO: 258 - DNA, 1754 bp, Homo sapiens
ggcacgagagccaacccagatcccactacctccatgagtgctacagacaggatggggcccagagctgtgccgggtctgcggctggcactgctgttgctgctggtgctagggacacccaagtcaggggtacaggggcaggaagggctggacttccctgagtacgatggtgtggaccgtgtgatcaatgtcaatgcaaagaactacaagaatgtgttcaagaagtatgaggtgctggcactcctctaccatgaaccccccgaggatgacaaggcctcacaaagacaatttgagatggaggagctgatcctggagttagcagcccaagtcctagaagacaagggtgttggcttcgggctggtagactctgagaaggatgcagctgtggccaagaaactaggcctaactgaagtggacagcatgtatgtattcaagggagatgaagtcattgagtacgatggcgagttttctgctgacaccatcgtggagtttctgcttgatgtcctagaggaccctgtggaattgattgaaggtgaacgagagctgcaggcgtttgagaatattgaggatgagatcaaactcattggctacttcaagagcaaagactcagagcattacaaagccttcgaggatgcagctgaggagtttcatccctacatccccttcttcgccaccttcgacagcaaggtggcaaagaagctgaccctgaagctgaatgagattgatttctacgaggccttcatggaagagcctgtgaccatcccagacaagcccaatagcgaagaggagattgtcaacttcgtggaggagcacaggagatcaaccctgaggaaactgaagccggagagtatgtatgagacctgggaggatgatatggatggaatccacattgtggccttcgcagaggaagctgatcctgatggtttcgagttcttagagactctcaaggctgtggcccaagataacactgaaaacccagatcttagcatcatctggattgaccctgatgacttccccctgctggtcccatactgggagaagacgtttgacatcgacttgtcagccccacaaataggagtcgtcaatgttactgatgcggatagcgtatggatggaaatggacgatgaggaggacctgccttctgctgaggagctggaggactggctggaggatgtcctggagggcgagatcaacacagaggacgatgacgatgatgatgatgactagttgccatggcaaccatctttcagccccactggtcttttcatgctctctcctgccttcccttgtccttccctgagttcctccagggagactaggttattctctgccatagagctaactggggtctatatgctgggtgctgagacactgatccccctcatttgatgagcaaatgagctacttttccctagacaccaggccagctctctcttatctgacttctgtttcttatcccataacttacttgtatctattatgtgtctcttccatcactctccatactctttcttgtgattctcctctagccatatatatgggccccatctctgttctgttccctccatctatgcacagctttcccccactctctctaatcctgtatctttctgactgtcctgtccttggccagaaggaagggagaatactgtgtttgggactgtatctcagcaatcacttgttaatgtatttgggtcaaatgagaggcctcaataaagacatctggggcagcatgaaaaaaaaaaaaaaaaaaaaaa

SEQ ID NO: 259 - DNA, 3103 bp, Homo sapiens
  SITE (1856): n equals a,t,g, or c
ggaagaagggtctcgggtccctaagccacgggagaacctgcagttttggaggatttgacttgacgaatcgctctctgcacgttggcagtaataattctgacccaatgggtaaagaaggagactttgtgtacaaagaagtcatcaaatcacctactgcctctcgcatctctcttgggaaaaaggtgaaatcagtgaaagagacgatgagaaagagaatgtctaaaaaatacagcagctctgtctctgagcaggactcgggccttgatggaatgcctggctcccctccgccttcacagcccgaccccgaacacttggacaagcccaagctcaaggccgggggttctgtagaaagtcttcgcagttctctcagtgggcagagctccatgagcggtgcaaacagtgagcaccactgattcctgcaaccagcaaccgggaaagcgtcaagtcggaagatggggatgacgaagagccgccttaccgaggcccgttctgcgggcgtgccagggtgcacaccgacttcacccccagtccctatgacacagactcactcaagctcaagaaaggagatatcatcgatataatcagcaagccacccatggggacctggatgggcctgctgaacaacaaagtcggcacgttcaagttcatctacgtggacgtgctyagtgaagacgaggagaaacccaaacgccccaccaggaggcgtcggaaaggacgaccaccccagcccaagtctgtggaggatctcctggatcggattaacctaaaaragcacatgcccactttcctgttcaatggatatgaagatttggacacctttaagctgctggaggaggaagacttggatgagttaaatatcagggacccggaacacagagctgttctcttgacagcagtggagctgttacaagagtatgacagtaacagcgaccagtcaggatcccaggagaagctgctcgttgacagccagggcctgagtggatgctcaccccgagactcaggatgctacgaaagcagtgagaacctggaaaacggcaagactcggaaagctagcctcctatctgccaagtcatccaccgagcccagcttgaagtcttttagcagaaaccagttgggcaattacccaacattgcctttaatgaaatcaggggatgcactgaagcagggacaggaggagggcaggctgggtggtggccttgccccagacacgtccaagagctgtgacccacctggtgtgactggtttgaataaaaaccgaagaagcctcccagtttccatctgccggagctgtgagaccctggagggcccccagactgtggacacttggccccgatcccattccctggatgaccttcaagtggagcctggtgctgagcaagacgtgcctaccgaggtgacagaaccgccccctcagattgtacctgaagtgccacagaagacgaccgcctcttccacgaaggcccagcccctggagcragactctgctgtcgacaatgcattgctactgacccaaagcaagagattttctgaacctcagaaattgacaactaagaaactggagggctcaatcgcagcctctggtcgcggcctgtcaccccctcagtgtttgcccagaaactatgatgctcagcctcctggagctaaacacggtttagcaaggacgcctctggagggccacagaaaaggacacgagtttgaaggaacacaccatcccctgggcaccaaagaaggggtagatgctgagcagagaatgcagcccaaaattccatcacagcctccacctgttcctgccaaaaagagcagagaacgccttgctaacggactccaccctgttcccatgggccccagtggggccntccccagtcccgatgcgccatgcctgccagtgaaaaggggcagccccgccagccccaccagccctagcgactgtcccccagcactggctcccaggcctctctcagggcaggcgcctggcagcccaccaagcacaaggccgcccccctggctctcagagctccccgagaacacaagcctccaggagcacggtgtgaagctgggcccggctttgaccaggaaggtctcctgtgcccggggagtggatctagaaacgctcactgaaaacaagctgcacgctgaaggcatcgatctcacggaggagccgtattctgataagcatggccgctgtgggattcctgaagccctggtgcagagatacgcagaggacttggatcagcccgagcgggacgtcgccgccaacatggaccagatccgggtgaagcagcttcggaagcagcaccgcatggcgattccaagtggtggactcacggaaatctgccgaaagcccgtctctcctgggtgcatttcgtctgtgtcagattggctcatttccatcggtctgcccatgtacgccggcaccctctccaccgcgggcttcagcacactgagccaagtgccttctctgtctcacacttgccttcaggaggccggcatcacagaggagagacacataagaaagctcctatctgcagccagactcttcaaactgccgccaggccctgaggccatgtagccaggcccggaatgggcctctctggacaagagccaccctttcactgtgcatatgatgctgatgcaattcctccatcatctctggacgtgcagaccagatccagaagaaaggcctggcgtgtggccaaacagcgtgaaaccttggcacaggactgaggatcctctcctccagaaaagccccctcgaggaaataaattagtgcggttctctttgacctccaaagacaagacaagcacttatttttattttcagaagacaaaagaaccaagatgccaactggctgcgaatgctctatctccagtctgtctctgtgtactggtagaggctgggaggagtagggggcagcctgttccatttctgatagtgcccttgctcttctgtctgtcatcttgcaggatgcccgagggccagatgggcttagctaggccaaagtaacagactcaagagttattgtacattactgaccacgctcatttgttcaaaagttagaacatctggctgcaccaggaaaaaaaaaaaaaaaaaactcgagacc

SEQ ID NO: 260 - DNA, 1168 bp, Homo sapiens
aagcctggggtgtcctgaactctgcctgcttccccagccctgccagtttccagagaaggcgcttgagaaggagaaacgaatcgctgctgctcttctaaaagccggttccctctctggtgtctgtggaccctgcttctgaagtacatgaaccttgaggaaaattgaccagttctagcagttctaaaatcatggctcgtgatttggtgatgttcagagatgtggctgtagacttttctcaggaagaatgggaatgcctgaactcatatcagaggaatttgtacagagatgtgatattagagaactatagcaacttggtgtcactggcaggatgttctatttctaagccagatgtgatcaccctattggaacaagggaaagagccctggatggttgtgaggggatgagaaaagaagatggactctagatttggaatccagatatgacactaaaaagttatttcaaggaaaggatatttatgaaatgaacttatctcagtggaaggtaatggaaagaattaaaagctgtggacttgaagaacaagaaagtcctcatgaggtgtgtttcaggcaagtgacaaaaaccacctctgaaaaaatgcctacttacagaaaactcacatctcttcctctgtatcagaaaagtcataacagagagaaaccctacgaatgtggggaatgtgggaaggcttttagagtacgacaacaacttactttccatcaaagaattcatactggtgagaaaccctatgaatgtaaagaatgtggaaaagcctttagacagtgtgcccacctcagtcgacatcagagaattcatacttctgacaaactctatgaatgtaaaaaatgtggaaagatcttcacatgtggctcagaccttcgagtacatcagagaattcatattggtgagaagccgtatgaatgtaaagaatgtgggaaagcctttagagttagaggacaacttaatctccatcaaaggattcacacgggtgagaaaccctatgaatgtaaagaatgtgggaaggcctttaggcagtatgcacaccttactcgacatcagagactgaacattgctgagaagtgctatgagtgtaaggaatgtggtcaggcctttctgtgtagtacaggccttcgactacatcacaaacttcatactggagaaaaaaaaaaaa

SEQ ID NO: 261 - DNA, 406 bp, Homo sapiens
gacctagctgggggagaagcccgaggaagattgaccaattttgtaattctagaaacatggtccatggatcagtgacattcagggatgtggccattgacttctctcaggaggagtgggagtgcctgcagcctgatcagaggaccttgtacagggatgtgatgttggagaactacagccacctgatatcactgggaagttccatttctaagccagatgtgattacattactagagcaagagaaagagccctggattgttgtaagtaaagaaacaagcagatggtatccagatttggagtcaaaatatggacctgagaaaatatctccagaaaatgatatttttgaaataaatttacccaaacatgttataaagcaaataagtaaaacaaaaaaaaaaaaaaaaaaaac

SEQ ID NO: 262 - DNA, 1788 bp, Homo sapiens
ccgggtcgacccacgcgtccggacgattctgggcagtgtcgtccccagaggtcggcggccgttgcccgctcaccagcgacgcggggcgcctgcggggacggacactgcccatctctaagataagagcctggaaagaggactctgttggctgttggaaattgcagagtaatgcctcaggtgacatttaatgatgtggctatagactttactcatgaagagtggggatggctcagttctgctcagagggacttatacaaggatgtgatggtccagaattatgagaacctggtctctgtaggtctttctgtaactaagccatatgtgatcacgttattggaggatggaaaagagccctggatgatggagaaaaaactgtcaaaaggtatgattccagattgggaatcaagatgggaaaacaaggaattatcaacaaagaaggataattatgatgaagattcaccccaaacagtaataatagaaaaagttgtaaaacaaagttatgaattttcaaattctaagaagaatttggaatatatagagaagttggaagggaagcatggaagtcaggtagaccatttcagaccagcaattctcacctctagagaaagccccactgcagacagtgtttacaaatacaatatatttagaagcacctttcattcaaagtctactctttctgaaccacaaaaaatttctgctgaagggaattcacacaaatatgatatattaaagaagaacttaccaaaaaagtcagttataaaaaatgagaaagtcaatggtggaaagaaacttttgaattctaataaaagtggggcagccttcagccagggcaaatctcttacccttccccagacttgtaatagagagaaaatctatacatgcagtgaatgtgggaaagcctttggcaaacagtcaatcctcaatcgccactggagaattcatacaggagagaagccctatgaatgtcgtgaatgtgggaagacttttagccatggctcatcccttacacgacatctgataagccatagtggagagaaaccttacaaatgtattgaatgtgggaaggcctttagccatgtctcatcacttactaaccatcagagcactcacactcgagagaaaccatatgaatgtatgaactgtggaaagtcttttagtcgtgtgtcccatcttattgaacatctaagaattcatactcaagaaaaactctatgagtgtcgtatatgtggaaaggccttcattcataggtcatctctcattcaccatcagaaaatccatactggagagaagccttatgaatgtagaaaatttagaaattgagggaagtcttcagttccaagtatatcccttattctacagcagagaactcaaaatggagagaaatctcatttaagagatgtagcaaagtgttcactaagagtgtttatcttggtacccatcagaagattaatggtagaacaacctgaaggatttaggagttatgtgtaaatctttgcagtcatgctatttgtaaactggattctacaggagagcaaataaacattataataaaatatgcatttcttagagcagtagcttgcagtttcagttgagttctacttagaaattctttttagctagtgggcatgtgaagatatttagtcacccagaggagccagtaagtgttataatattgaaaattaaagctgcaaaagaaataaagtgatgttaataaaagttttggcatctaataaaatcattttgtatatcccaaaaaaaaaaaaaaaaaaaaaaaaaaaaaaaaaaaaa

SEQ ID NO: 263 - DNA, 1282 bp, Homo sapiens
gggtcgacccacgcgtccggacccctcctgcctgcagaaagccccacctaacactgacctgccagcaaactctaaagaaacccaaaagtcaccatcagactgcaggccggagatacctgaggggaatctcagggctgggacataggcttaatttctgaggccccattctccagccatcctgactctgtttcttaggcggggaagtcataggttagggagcacctcacactttcctcaggagaagacacacaaccatgaccctcagcctggggaccccaactccaggccctccagccccaaacctgcccagccagccctgaaaatgcaagtcttgtacgagtttgaagctaggaacccacgggaactgactgtggtccagggagagaagctggaggtgaggcttgggccataggctagaaaaggaggtggtggttggtgggagctacaggcagccaagggtggatggtccagggatggagctgccaaggtgggtggcctagagagggagaaggagggtaggaaagagctggagggagaaagccttgtgtggggagggaaggctggctggaaagaggctcaggggactgaggtggtgactcttggcaggttctggaccacagcaagcggtggtggctggtgaagaatgaggcgggacggagcggctacattccaagcaacatcctggagcccctacagccggggacccctgggacccagggccagtcaccctctcgggttccaatgcttcgacttagctcgaggcctgaagaggtcacagactggctgcaggcagagaacttctccactgccacggtgaggacacttgggtccctgacggggagccagctacttcgcataagacctggggagctacagatgctatgtccacaggaggccccacgaatcctgtcccggctggaggctgtcagaaggatgctggggataagcccttaggcaccagcttagacacctccaagaaccaggccccgctgatgcaagatggcagatctgatacccattagagccccgagaattcctcttctggatcccagtttgcagcaaaccccacaccccagctcacacagcaaaaacaatggacaggcccagagggtgaagcaaacagtgtcccttctggctgtgttggagcctccccagtaaccacctatttattttacctctttcccaaacctggagcatttatgcctaggcttgtcaagaatctgttcagtccctctccttctcaataaaagcatcttcaagcttgtaaaaaaaawwttaaaaa

SEQ ID NO: 264 - DNA, 893 bp, Homo sapiens
gggtcgacccacgcgtccgaagcacccttaggataccaggaccctgtttcccttcggagaagacacacaaccatgaccctcagcctggggaccccaactccaggccctccagccccaaacctgcccagccagccctgaaaatgcaagtcttgtacgagtttgaagctaggaacccacgggaactgactgtggtccagggagagaagctggaggttctggaccacagcaagcggtggtggctggtgaagaatgaggcgggacggagcggctacattccaagcaacatcctggagcccctacagccggggacccctgggacccagggccagtcaccctctcgggttccaatgcttcgacttagctcgaggcctgaagaggtcacagactggctgcaggcagagaacttctccactgccacggtgaggacacttgggtccctgacggggagccagctacttcgcataagacctggggagctacagatgctatgtccacaggaggccccacgaatcctgtcccggctggaggctgtcagaaggatgctggggataagcccttaggcaccagcttagacacctccaagaaccaggccccgctgatgcaagatggcagatctgatacccattagagccccgagaattcctcttctggatcccagtttgcagcaaaccccacaccccagctcacacagcaaaaacaatggacaggcccagaggctgaagcaaacagtgtcccttctggctgtgttggagcctccccagtaaccacctatttattttacctctttcccaaacctggagcatttatgcctaggcttgtcaagaatctgttcagtccctctccttctcaataaaagcatcttcaagcttgaaaaaaaaaaaaaaaaaaaaaaa

SEQ ID NO: 265 - DNA, 1610 bp, Homo sapiens
  SITE (1): n equals a,t,g, or c
  SITE (2): n equals a,t,g, or c
  SITE (3): n equals a,t,g, or c
  SITE (1609): n equals a,t,g, or c
nnncgccactcgaaattaaccctcctaaagggaacaaaagctggagctccaccgcggtggcggccgctctagaactagtggatcccccgggctgcaggaattcggcacgaggttgaagtgcaggaccttaagctatcagtgcacaaaagtcaacaaaatgactgtgctaataaggagaacattgtcaattcttttactgataaacaacaaacaccagaaaaattacctataccaatgatagcaaaaaaccttatgtgtgaactcgatgaagactgtgaaaagaatagtaagagggactacttaagttctagttttctatgttctgatgatgatagagcttctaaaaatatttctatgaactctgattcatcttttcctggaatttctataatgraaagtccattagaaagtcagcccttagattcagatagaagcattaaagaatcctcttttgaagaatcaaatattgaagatccacttattgtamcaccagattgccaagaaaagacctcaccaaaaggtgtcgagaaccctgctgtacaagagagtaaccaaaaaatgttaggtcctcctttggaggtgctgaaaacgttagcctctaaaagaaatgctgttgcttttcgaagttttaacagtcatattaatgcatccaataactcagaaccatccagaatgaacatgacttctttagatgcaatggatatttcgtgtgcctacagtggttcatatcccatggctataacccctactcaaaaaagaagatcctgtatgccacatcagaccccaaatcagatcaagtcgggaactccataccgaactccgaagagtgtgagaagaggggtggcccccgttgatgatgggcgaattctaggaaccccagactaccttgcacctgagctgttactaggcagggcccatggtcctgcggtagactggtgggcacttggagtttgcttgtttgaatttctaacaggaattccccctttcaatgatgaaacaccacaacaagtattccagaatattctgaaaagagatatcccttggccagaaggtgaagaaaagttatctgataatgctcaaagtgcagtagaaatacttttaaccattgatgatacaaagagagctggaatgaaagagctaaaacgtcatcctctcttcagtgatgtggactgggaaaatctgcagcatcagactatgcctttcatcccccagccagatgatgaaacagatacctcctattttgaagccaggaatactgctcagcacctgaccgtatctggatttagtctgtagcacaaaaattttccttttagtctagcctcgtgttatagaatgaacttgcataattatatactccttaatactagattgatctaagggggaaagatcattatttaacctagttcaatgtgcttttaatgtacgttacagctttcacagagttaaaaggctgaaaggaatatagtcagtaatttatcttaacctcaaaactgtatataaatcttcaaagcttttttcatctatttattttgtttattgcactttatgaaaactgaagcatcaataaaattagaggacactattgaaaaaaaaaaaaaagggggggccnc

SEQ ID NO: 266 - DNA, 2257 bp, Homo sapiens
gaaggcatagaggaactgagtgatccctctgggcccaaatcctatagtataacagagaaacactatgcacaggaggatcccaggatgttatttgtagcagctgttgatcatagtagttcaggagatatgtctttgttacccagctcagatcctaagtttcaaggacttggagtggttgagtcagcagtaactgcaaacaacacagaagaaagcttccgtatttgtagtccactctcaggtgctaatgaatatattgcaagcacagacactttaaaaacagaagaagtattgctgtttacagatcagactgatgatttggctaaagaggaaccaacttctttattccagagagactctgagactaagggtgaaagtggtttagtgctagaaggagacaaggaaatacatcagatttttgaggaccttgataaaaaattagcactagcctccaggttttacatcccagagggctgcattcaaagatgggcagctgaaatggtggtagcccttgatgctttacatagagagggaattgtgtgccgcgatttgaacccaaacaacatcttattgaatgatagaggacacattcagctaacgtattttagcaggtggagtgaggttgaagattcctgtgacagcgatgccatagagagaatgtactgtgccccagaggttggagcaatcactgaagaaactgaagcctgtgattggtggagtttgggtgctgtcctctttgaacttctcactggcaagactctggttgaatgccatccagcaggaataaatactcacactactttgaacatgccagaatgtgtctctgaagaggctcgctcactcattcaacagctcttgcagttcaatcctctggaacgacttggtgctggagttgctggtgttgaagatatcaaatctcatccattttttacccctgtggattgggcagaactgatgagatgaacgtaatgcagggttatcttcacacattctgatcttctctgtgacaggcatctccagcactgaggcacctctgactcacagttacttatggagcaccaaagcatttggataaagaccgttataggaaatgggggggaaatggctaaaagagaacaattcgtttacaattacaagatattagctaattgtgccagrggctgttatatacatatatacacaaccaaggtgtgatctgaatttaatccacatttggtgttgcagatgagttgtaaagccaactgaaagagttccttcaagaagttcctctgataggaagctagaagtgtagaatgaagttttacttgacagaaggacctttacatggcagctaacagtgctttttgctgaccaggattggtttatatgattaaattaatatttgcttaataatacactaaaagtatatgaacaatgtcatcaatgaaacttaaaagcgagaaaaaagaatatacacataatttctgacggaaaacctgtaccctgatgctgtataatgtatgttgaatgtggtcccagattatttctgtaagaagacactccatgttgtcagctttgtactctttgttgatactgcttatttagagaagggttcatataaacactcactctgtgtcttcaacagcatctttctttccccatctttctattttctgcaccctctgcttgttccctcatattctgttcttccgactcctgctaacacacatgcaacaaaaaagggaagggagtgcttatttccctttgtgtaaggactaagaaatcatgatatcaaataaacatggtgaaacattagatctcttcttcatttaataaccctcccccctttttttccttgaagaaatgcgtctgttcctttccttgtgaaatattatcagtttctaccattgcttctcatgcttgactttgttttactttttggcttggtatactaagaagmaaaggatctcatctaaatggaattgaatggcagtcctagtttgttacttatggtgatgagattttcagatttgaactaatctatttgacgtgatttagaaagaatgtaagtattcacacatctccaaacatttgtatttgttacttctttttgttgctaaggtagctcctgtagttatgcattgttgcaaaaatttacaaatgttttaaaagtgttaacatctagtttttttttaaacgttagccaaagaagaagtcactatttccaagttagaaaccaccagaaataattgaaatttttgatatgttctaatcttctttg

SEQ ID NO: 267 - DNA, 2863 bp, Homo sapiens
ggcagagcggactacagcatgaaggaattttccgggtgtcaggatcccaggtggaagtgaatgacatcaaaaatgcctttgagagaggagaggaccccctggctggggaccagaacgaccatgacatggattccatagctggtgtcctgaagctttacttccgggggctggaacaccctctcttccccaaggacatctttcatgacctgatggcctgcgtcacaatggacaacctgcaggagagagctctgcacatccggaaagtcctcctagtcctgcccaaaaccactctgattatcatgagatacctctttgccttcctcaatcatttatcacagttcagtgaagagaacatgatggacccctacaacctcgccatctgcttcgggccctcgctaatgtcagtgccagagggccacgaccaggtgtcctgccaagcccacgtgaatgagctgatcaaaaccatcatcatccagcatgagaacatcttcccaagccccagggagctggagggccctgtctacagcagaggaggaagcatggaggattactgtgatagccctcatggagagactacctcggttgaagactcaacccaggatgtgaccgcagagcaccacacgagcgatgacgaatgtgagcccatcgaggccattgccaagtttgactacgtgggccggacagcccgagagctatcctttaagaagggagcatccctgctgctttaccagcgggcttccgacgactggtgggaaggccggcacaatggcatcgacggactcatcccccatcagtacatcgtggtccaagacacgttgatatcctgagtgagtctgcaccctcccagcctcttcccggctcgttctgcagggaaatcctccctctgttgatagcatcgcaaacctggtggcaatctgtgcgtggacaggaccctyccaaatttagcattatgacttcaccacaggatcaagagaagatgaattgtgggggagaaggggctttctttgtcatcagtagccagaggggccaggagagcagtggagagacctgggaccggcttggatgctctgagcggggctagaggcgctacgacagtgtgtggcggtgtcctgccacgacgccgccgtctccagagccaccacacagttgactgtccttacccggcagtgctcaggacctcagccgataaaccacaacctggacttgccgcctccttctccaggaggccgccccagcacggcctccccaggaagcagcatggggtagaaggcagatgcctcgaatccaggtgtcccctagccacgctttcctgaggagctgaggagcccgcagaactcagcggattatttatttttatttaaacgacccttcaaaggcccttaggtttccttgcctctgctcacagaactagtccagccaggtgtcgctgctgcctcaragctgtgtggggtcgcgtgtatgtcggggggccatcttgccgatttaacgctgctttttgtgttgttgttgttttccctcctccctgcctgcctgccccttctcccccagcgaggacggtgtcgtggagaggtccagccccaagtctgagattgaggtcatttctgagccacctgaagaaaaggtgacagccagagcgggggccagctgtcccagtgggggtcatgtagccgatatttatcttgcaaacatcaacaagtaagctctgcttttcattttctgctcccctgaatgacttgcaacacccagcctcaccctctggcctaacccccatctccattcctgtgctgcacgtagggctcccagctcccccagcctaacagtttgcatgtggtcattgctgctgcaaggcggacagggctgaggatgctgctacaagcctcggggcaggtccaggtctccagctagctgccctcgtgctgtggaagggtgctttactgtgtgttcccgcagtgtctgtccacccagacctttgtggcagtcttacagctaaaactttgaccaaagctttggtcactttatgcaacctggttttgtactgtttctcagaggtgccttcttttttccaatccatactcaaataatagtctttgatgtctgtcttccttgacccgtgttcgtgcaaagattcagagtctgtgtgtggcttctactaggctgatgttacaccaggtgggtttattgagatatcatgtgtctgttcctccccctgtcctgcattcactcctgtggaggaaaggaggccacgatgtccctaaggaaagctttgtcctgagctcttcattcattggctaacccctagctcccttttcttctgccctttcacaccaggagaaataattttccattttgttcctattgctttggccttttgtattattctacccccttagtccctttgcagatccccactcctgctcagcaggctcttacctctgacccccagctttcattgtggctgttagcaacatcctggggtttaaactccacccacgcccgatctggctgtctagagggattctacgcctgcgtgctgccgcctccccaagaggcattcaggttattggagaactaatctcatctcaaggggccagacaccaagtcccaaagcctacagacctctttccgccaggccctgaaacctggccccgtgccagcaggatgacaagccccagggcgctcctgatgaatatggattggagatgatgtacagtttttattcccctctggcttttgaggaatgaaatgatttgcactttgaaaacctgttaaccgtagcctctggacactgagactggaaggagaataaaggatgcttgttgtttttaaactataaaaaaaaaaaaaaaaaaaaaaaaaaaaaaaa

SEQ ID NO: 268 - DNA, 462 bp, Homo sapiens
acgcgtccggtggtgggaggcctcagtcatagttccatttcacgcctcaaagagacccattctcatctttcttcagaagttacaaagaactggaatgaaatgacagagttggtctcctccaacggcaattactgcaattaccgcaagactgggacgtctagtccacaggaagacctgcaccactgtcgccttcacacaggtgaactcggaagacaaaggcgctttggctaagctggtggaagctatcaggaccaattacaatgacagatacgatgagatccgccgtcactggggtggcaatgtcctgggtcctaagtctgtggctcgtatcgccaagctcgaaaaggcaaaggctaaagaacttgccactaaactgggttaaatgtacactgttgagttttctgtacataaaaataattgaaataatacaaattttccttcaaaaaaaaaaaaaaaaaaaaa

SEQ ID NO: 269 - DNA, 2358 bp, Homo sapiens
gggaccccggtgtctggcttcccccgagccgggaccccgcgatggccaagcgcagctcgctgtacatccgcatcgtggaggkkaagaaccttcccgccaaggacatcactggcagcagcgacccctactgcatcgtgaaggtggacaatgagcccatcatcaggacagccacagtgtggaagaccctgtgccccttctggggtgaggagtaccaagtgcacctgccgcccaccttccacgctgtggctttctatgtcatggatgaggatgccctcagccgggacgacgttatcggaaaggtctgccttacaagggacaccatagcctctcaccctaagggtttcagcgggtgggcccacctgacggaggtcgaccccgacgaggaggtgcagggcgagatccacctgcggctggaagtgtggccaggggcccgggcctgccggctacgctgctctgtgctggrggccagggatctggccccaaaggaccgcaatggcacatctgaccccttcgtccgagtgcgctacaagggccggacacgggagacctcgatcgtgaagaagtcatgctacccacgctggaatgagacgtttgaatttgagctgcaggagggggccatggaggcgctgtgcgtggaggcctgggactgggaccttgtcagccgaaacgacttcctgggcaaagtggtgattgatgtccagagactgcgggtggtgcagcaggaggagggctggttccggctgcagcccgaccagtccaagagccggcggcatgacgagggcaacctgggctccttgcagctggaggtgcggctgcgggacgagacggtgctgccctccagctactaccagccactggtgcacctgctgtgccacgaggtcaagctgggcatgcagggcccagggcagctgatcccactcatcgaggagacaaccagcaccgagtgtcgccaggacgtggccacgaacctgctcaagctcttcctggggcaggggctggccaaggacttcctggacctgctcttccagctggagctgagtcgcaccagtgagaccaacaccctgttccggagcaactctctggcctcaaagtccrtggagtcttttctgaaggtggccgggatgcagtacctgcacggcgtcctgggccccatcatcaacaaggtgtttgaggagaagaagtacgtggagctggaccccagcaaagtggaagttaaggatgtagggtgctccgggctgcaccgcccgcagaccgaggccgaggtgctggagcagagcgcgcagacgctgcgcgcccacctgggggccctgctgagcgcgctcagccgctcggttcgcgcgtgccccgccgtggtgcgcgccaccttccgccagctcttccggcgcgtgcgcgagcgyttccccggcgcccagcacgagaatgtaccgttcatcgccgtcaccagcttcctgtgcctgcgcttcttctctcccgccatcatgtcgcccaagctcttccacctgcgggagcgccacgcggacgcccgcaccagccgcaccctgctcctgttggccaaggcagtccagaacgtgggtaaaatggacacgccggcttccagggccaaggaggcttggatggagccgctgcagcccaccgtgcgccagggcgtggcgcagctgaaggacttcatcaccaagctcgtggacatcgaggagaaggacgagctggacctgcagcggacgctgagtttgcaggcgccacctgtgaaggaggggccactcttcatccacaggaccaagggcaagggccccctcatgtcctcctccttcaagaagctctacttctccctcactaccgaggccctcagcttcgcgaagacgcccagctccaagaaaagcgccctcatcaagttagccaacatccgggcagcggaaaaggttgaggaaaagagctttggcggctcgcacgtcatgcaggtcatctacacggacgacgccggcaggccccagactgcctacctgcagtgcaagtgtgtgaatgagcttaaccagtggctgtctgcgctgcggaaggtgagcatcaacaacaccggactgctgggctcctaccaccctggcgtcttccgtggggacaagtggagctgctgccaccaaaaagagaagacaggtcagggctgcgataagacccggtcacggtgaccctgcaggagtggaatgaccctcttgaccatgaccttgaggcccagctcatctgccggcacctgctgggcgtggaggccatgctgtgggagaggcaccgggagctgagcgggggcgcagaggcaggcacggtgcccacgagccctggcaaagtccccgaggactcattggcccggctgct

SEQ ID NO: 270 - DNA, 230 bp, Homo sapiens
agggtctgggggtggcctgggcacatgctgagggttctctcctgaaggacagccacagtgtggaagaccctgtgccccttctggggtgaggagtaccaagtgcacctgccgcccaccttccacgctgtggctttctaygtcatggatgaggatsccctcagccgggacgacgttatcggaaaggtctgccttacaagggacaccatagcytctcaccctaagggtttcag

SEQ ID NO: 271 - DNA, 551 bp, Homo sapiens
tcggaccccaacaacactgcgagaggcctctgaccctgccactcccagtaatttcctgcccaagaagacccccttgggtgaagagatgacacccccacccaagcccccacgcctctacctcccccaggagccaacatccgaggagactccgcgcaccaaacgtccccatatggagcctaggactcgacgtgggccatctccaccagcctcccccaccaggaaaccccctcggcttcaggacttccgctgcttagctgtgctgggccggggacactttgggaaggtcctcctggtccagttcaaggggacagggaaatactacgccatcaaagcactgaagaagcaggaggtgctcagccgggacgagatagagagcctgtactgcgagaagcggatcctggaggctgtgggctgcacagggcaccctttcctgctctccctccttgcctgcttccagacctccagccatgcctgctttgtgactgagtttgtgcctggtggtgacctcatgatgcagatccacggaggatgtcttccccgagccccaggcc

SEQ ID NO: 272 - DNA, 2158 bp, Homo sapiens
gctggtctcgaactcctgagctcaggcaatctgtccacctcgacctcccaaactgctaggattacaagcgtgagcacccagcctcatacttatttttaatatttaaaatgattttgcttttcttgtttcttagtgcatgtaaagaagtatctttgcctgctgtataactgtgtgtatctcattttcctcacagtacttattgattccatttacaaagtgactgagggccggcagtctgaaatattccacagacaagctgaggggaacttcgaccccagctgctgcttcaccatctaccatggcaaccacatggagtccctggacctcatcacctccaaccccgaggaggcccgcacctggatcacaggcctcaagtacctgatggctggcatcagtgatgaagactcccttgccaaaaggcagaggacccatgaccaatgggtgaagcagacctttgaggaagctgataagaatggtgacggcttgctgaatattgaagagatacatcagctgatgcataaactgaatgttaatctgccccgaagaaaagtcagacaaatgtttcaggaagccgacacagatgagaatcagggaactttgacatttgaagagttctgtgttttttacaaaatgatgtctttgagacgagacctttatttgttacttttgagctacagtgacaagaaagatcacctaactgtggaagaactggctcagtttttgaaggtggagcaaaaggtatcattagactgttaaaatgaaagtttacttaaaagtactcatgaaagatatgtctttcttttggggttaaatataggtatactttgaattttgcaaaggtggtaaatatcactagttcacaaaaatcttatctatgagtcatttaaaacagtttctagcagcttttaagacaggaagtgataacttgaacactgggttatataattcttaatcttaaatgtattgagtacagatatgcctattttccccacaaagaaatgaatgttaatattttaatacaatggtaatactttctttatactaatactatgatgtattaatattagtttaaatttatactatatattagtataaattcatattagtataaatttagtcaaatttatttattttaaatataaatttatatttatactaataaaatagctagatatttaactatggcataattcttaactactattgtggtaggtcattggtaattctgatagtaaattgccatttgatcatgtgaaaaggctaagtaaattaggtcctgattagcaaagagaatctctaagtatgtttaaaataaggtgttttaatcttaatattatataggctgaattatggtcagcaaagctaacttctcagtctgctttttaaatatctcctcaaagtctgtttctcactaaagtagaggaataaatgaatgttttattcaaattttttaaccttttatattagacttcttgagaggaggctttggttttgtgcagttgatgaggtttacttttaattctcttaatggaccaatcgtcttaatataaagagctgcttaactcctttgttcattttaagtcagcggcatttagctctgttgaaattgtaaaaaatcatcaaatatttggactatatagtacaataatcagtagaaataattctttctacagtactcacacaaataatcagccagcttgtgcttgaacactttccaattttttaataaaggctttattgagatattattcacataccataaaattcaccatttttaaagtatacatttaagtgttttttagtgtatcaacagagttgtgcaactattggccaggcacggtgtctcatgcctgtaatcccagcactttgggaggctgaggcgggtggatcacctgaggtcaggagtttgagacaagcctagccaacatggcgaaacccagtctctactaaaaatacaaaaattagcaggctgtggtggcgaacccctgtaatctcagctacttgggagtctgaggcagggagaattgcttgaacccaggaggtggaggttgtagtgagctgagattgagcccctgcactccagcctgggcggcagagcgagactccacctcaaaaaaaaaaaaaaaaaaaaaaagaaagaaaaaaaaaaaaaaaaaaa

SEQ ID NO: 273 - DNA, 503 bp, Homo sapiens
  SITE (349): n equals a,t,g, or c
  SITE (418): n equals a,t,g, or c
  SITE (465): n equals a,t,g, or c
  SITE (488): n equals a,t,g, or c
gtgatgtggtagatccttatgtctatgttgaaatccatggaatccctgctgattgtgcagaacaaaggacaaaaacagtgcaccagaatggagacgctcccatttttgatgaaagctttgaatttcaaatcaacctgcctgaactggccatggtgcgctttgtagtgctggatgatgactacattggggatgaattcatcggccagtacacaattccctttgaatgtttacagacgggctaccgccatgtccccctgcagtccttaactggagaggtccttgcacatgcttctttatttgtccacgtggctattacttaaccgaagagggaggaggggaagccttcatnaaaagggggcctttcttgttgaggaaaaggggaaggaaatccagggggaatatggcatcttttgaggancactgtgggatttaaaaccgtgggatggagggtatttcaaggattgncccagcccccctattacgggggnttgcccacagatctt

SEQ ID NO: 274 - DNA, 2175 bp, Homo sapiens
  SITE (24): n equals a,t,g, or c
  SITE (176): n equals a,t,g, or c
  SITE (402): n equals a,t,g, or c
  SITE (1324): n equals a,t,g, or c
attcggcacgatgagatcctacancccgaggagattaagctgcaggaggccatgttcgagctggtcacttccgaggcgtcctactacaagagtctgaacctgctcgtgtcccacttcatggagaacgagcggataaggaagatcctgcacccgtccgaggcgcacatcctcttctncaacgtcctggactgctggctgtcagtgagcggttcctcctgggagctggagcaccggatggaggagaacatcgtcatctctgacgtgtgtgacatcgtgtaccgttatgcggccgaccacttctctgtctacatcacctacgtcagcaatcagacctaccaggagcggacctataagcagctgctccaggagaaggcagctttccgggagctgatcgcgcatagnagctcgaccccaagtgcagggggctgcccttctcctccttcctcatcctgcctttccagaggatcacacgcctcaagctgttggtccagaacatcctgaagagggtagaagagaggtctgagcgggagtgcactgctttggatgctcacaaggagctggaaatggtggtaaaggcatgcaacgagggcgtcaggaaaatgagccgcacggaacagatgatcagcattcagaagaagatggagttcaagatcaagtcggtgcccatcatctcccactcccgctggctgctgaagcagggtgagctgcagcagatgtcaggccccaagacctcccggaccctraggaccaagaagctcttccacgaaatttacctcttcctgttcaacgacctgctggtgatctgccggcagattccaggagacaagtaccaggtatttgactcagctccgcggggactgctgcgtgtggaggagctggaggaccagggccagacgctggccaacgtgttcatcctgcggctgctggagaacgcagatgaccgggaggccacctacatgctaaaggcgtcctctcagagtgagatgaagcgttggatgacctcactggcccccaacaggaggaccaagtttgtttcgttcacatcccggctgctggactgcccccaggtccagtgcgtgcacccatacgtggctcagcagccagacgagctgacgctggagctcgccgacatcctcaacatcctggacaagactgacgacgggtggatctttggcgagcgtctgcacgaccaggagagaggctggttccccagctccatgactgaggagatcttgaatcccaagatccggtcccagaacctcaaggaatgtttccgtgtccacaagatggatgaccctcagcgcagccagaacaaggaccgcangaagctgggcagccggaatcggcaatgacccccacccagggggccagcgggagcagggcctgcatgagaccccgacagaaggtggggggggggctctgggaagcacaggccagcacctccccaggtggcaggatctggcttggggtgcccggccctcatccctgcccacgcatrrgtgctcatgtgtcttggccccttgctygcaaactggataaagggtgcccaagcctctcctgatgcatttgtaaacaagaaggtttcagcagtattacaccacctccctcatgcctccgagggggtggaagggggtgggcacactccagggccccccatgcccctggcccccagggactggaagaggctcccaacccagagtgtccctgtgggaggcaggcagaaggtgacaattgacacgatttcctgcacgcgtcctcctctaccttggaagcagttagaatctaccaggcacagatgaggccgcccttgcctgacggagcttgatgagcagcccttggtctccggttccaggactgagagcccagctgcctctgcccacccttccccaggcctctgccagcctctggctgcacggtcaggccctgccccatggcaggcctgccagagcttggctggggacccctcccgcctctggctccctgatgggctggatgtaacttgtgtcttctagccscttaaggagcccaggtgttttaaggaatgaattggtcactgcatcttgtatcgattatggttctgagaaaagcaaatatcacttttggctgcattaaaagaagcatcatatataaaataaaraaaaaaaaaaaaaaaaaactcggggggggggcccggta

SEQ ID NO: 275 - DNA, 3804 bp, Homo sapiens
ggcacgaggtgttccagtagaatgtccccaacctgagaaaatccccaatggaatcattgatgtgcaaggccttgcctatctcagcacagctctctatacctgcaagccaggctttgaattggtgggaaatactaccaccctttgtggagaaaatggtcactggcttggaggaaaaccaacatgtaaagccattgagtgcctgaaacccaaggagattttgaatggcaaattctcttacacggacctacactatggacagaccgttacctactcttgcaaccgaggctttcggctcgaaggtcccagtgccttgacctgtttagagacaggtgattgggatgtagatgccccatcttgcaatgccatccactgtgattccccacaacccattgaaaatggttttgtagaaggtgcagattacagctatggtgccataatcatctacagttgcttccctgggtttcaggtggctggtcatgccatgcagacctgtgaagagtcaggatggtcaagttccatcccaacatgtatgccaatagactgtggcctccctcctcatatagattttggagactgtactaaactcaaagatgaccagggatattttgagcaagaagacgacatgatggaagttccatatgtgactcctcaccctccttatcatttgggagcagtggctaaaacctgggaaaatacaaaggagtctcctgctacacattcatcaaactttctgtatggtaccatggtttcatacacctgtaatccaggatatgaacttctggggaaccctgtgctgatctgccaggaagatggaacttggaatggcagtgcaccatcctgcatttcaattgaatgtgacttgcctactgctcctgaaaatggctttttgcgttttacagagactagcatgggaagtgctgtgcagtatagctgtaaacctggacacattctagcaggctctgacttaaggctttgtctagagaatagaaagtggagtggtgcctccccacgctgtgaagccatttcatgcaaaaagccaaatccagtcatgaatggatccatcaaaggaagcaactacacatacctgagcacgttgtactatgagtgtgaccccggatatgtgctgaatggcactgagaggagaacatgccaggatgacaaaaactgggatgaggatgagcccatttgcattcctgtggactgcagttcacccccagtctcagccaatggccaggtgagaggagacgagtacacattccaaaaagagattgaatacacttgcaatgaagggttcttgcttgagggagccaggagtcgggtttgtcttgccaatggaagttggagtggagccactcccgactgtgtgcctgtcagatgtgccaccccgccacaactggccaatggggtgacggaaggcctggactatggcttcatgaaggaagtaacattccactgtcacgagggctacatcttgcacggtgctccaaaactcacctgtcagtcagatggcaactgggatgcagagattcctctctgtaaaccagtcaactgtggacctcctgaagatcttgcccatggtttccctaatggtttttcctttattcatgggggccatatacagtatcagtgctttcctggttataagctccatggaaattcatcaagaaggtgcctctccaatggctcctggagtggcagctcaccttcctgcctgccttgcagatgttccacaccagtaattgaatatggaactgtcaatgggacagattttgactgtggaaaggcagcccggattcagtgcttcaaaggcttcaagctcctaggactttctgaaatcacctgtgaagccgatggccagtggagctctgggttcccccactgtgaacacacttcttgtggttctcttccaatgataccaaatgcgttcatcagtgagaccagctcttggaaggaaaatgtgataacttacagctgcaggtctggatatgtcatacaaggcagttcagatctgatttgtacagagaaaggggtatggagccagccttatccagtctgtgagcccttgtcctgtgggtccccaccgtctgtcgccaatgcagtggcaactggagaggcacacacctatgaaagtgaagtgaaactcagatgtctggaaggttatacgatggatacagatacagatacattcacctgtcagaaagatggtcgctggttccctgagagaatctcctgcagtcctaaaaaatgtcctctcccggaaaacataacacatatacttgtacatggggacgatttcagtgtgaataggcaagtttctgtgtcatgtgcagaagggtatacctttgagggagttaacatatcagtatgtcagcttgatggaacctgggagccaccattctccgatgaatcttgcagtccagtttcttgtgggaaacctgaaagtccagaacatggatttgtggttggcagtaaatacacctttgaaagcacaattatttatcagtgtgagcctggctatgaactagaggggaacagggaacgtgtctgccaggagaacagacagtggagtggaggggtggcaatatgcaaagagaccaggtgtgaaactccacttgaatttctcaatgggaaagctgacattgaaaacaggacgactggacccaacgtggtatattcctgcaacagaggctacagtcttgaagggccatctgaggcacactgcacagaaaatggaacctggagccacccagtccctctctgcaaaccaaatccatgccctgttccttttgtgattcccgagaatgctctgctgtctgaaaaggagttttatgttgatcagaatgtgtccatcaaatgtagggaaggttttctgctgcagggccacggcatcattacctgcaaccccgacgagacgtggacacagacaagcgccaaatgtgaaaaaatctcatgtggtccaccagctcacgtagaaaatgcaattgctcgaggcgtacattatcaatatggagacatgatcacctactcatgttacagtggatacatgttggagggtttcctgaggagtgtttgtttagaaaatggaacatggacatcacctcctatttgcagagctgtctgtcgatttccatgtcagaatgggggcatctgccaacgcccaaatgcttgttcctgtccagagggctggatggggcgcctctgtgaagaaccaatctgcattcttccctgtctgaacggaggtcgctgtgtggccccttaccagtgtgactgcccgcctggctggacggggtctcgctgtcatacagctgtttgccagtctccctgcttaaatggtggaaaatgtgtaagaccaaaccgatgtcactgtctttcttcttggacgggacataactgttccaggaaaaggaggactgggttttaaccactgcacgaccatctggctctcccaaaagcaggatcatctctcctcggtagtgcctgggcatcctggaacttatgcaaagaaagtccaacatggtgctgggtcttgtttagtaaacttgttacttggggttactttttttattttgtgatatattttgttattccttgtgacatactttcttacatgtttccatttttaaatatgcctgtattttctatataaaaattatattaaatagatgctgctctaccctcacaaaatgtacatattctgctggctattgggaaagttcctggtacacatttttattcagttacttaaaatgatttttccattaaagtatattttgctactaaataaaaaaaaaaaaaaaaaaaaaa

SEQ ID NO: 276 - DNA, 613 bp, Homo sapiens
ggcacgagggagcagtatgtggtggtagccaactaccagaagcaggagagttcggagatcagcctcagcgtggggcaggtggtggacatcatcgagaagaatgagtcaggttggtggttcgtcagcactgccgaggagcaaggctgggtccctgcaacgtgcctcgaaggccaggatggggtgcaggatgagttttctctgcagcctgaagaagaggagaagtacacagtcatctacccgtacacagctcgggaccaggatgaaatgaacctggagagaggggctgtggtggaggtcatccagaaaaacctggaaggctggtggaagatcaggtaccagggcaaagaaggctgggcccccgcctcctacctaaagaagaacagtggggagcccttgcccccgaagccaggccctggctcaccctcccacccgggtgcccttgacttggatggtgtttcccggcagcagaacgcggtgggcagggagaaggagctgctcagcagccagagggacgggcggtttgaaggccgcccggtgcccgacggtgacgccaagcagagatcaccaaagatgaggcagagaccccctcctcgccgggacatgaccattcctc

SEQ ID NO: 277 - DNA, 1856 bp, Homo sapiens
ggcacgagctcgtgccgaattcggcacgaggagaatcctattgtaaaatcacttgctaaggctcatgagaggctagaagattccaaactagaagctgtcagtgacaataacttggaattagtcaatgaaattcttgaagacatcactcctctaataaatgtggatgaaaatgtggcagaattggttggtatactcaaagaacctcacttccagtcactgttggaggcccatgatattgtggcatcaaagtgttatgattcacctccatcaagcccagaaatgaataattcttctatcaataatcagttattaccagtagatgccattcgtattcttggtattcacaaaagagctggggaaccactgggtgtgacatttagggttgaaaataatgatctggtaattgcccgaatcctccatggggggaatgatagatcgacaaggtctacttcatgtgggagatataattaaagaagtcaatggccatgaggttggaaataatccaaaggaattacaagaattactgaaaaatattagtggaagtgtcaccctaaaaatcttaccaagttatagagataccattactcctcaacaggtatttgtgaagtgtcattttgattataatccatacaatgacaacctaataccttgcaaagaagcaggattgaagttttccaaaggagagattcttcagattgtaaatagagaagatccaaattggtggcaggctagccatgtaaaagagggaggaagcgctggtctcattccaagccagttcctggaagagaagagaaaggcatttgttagaagagactgggacaattcaggacctttttgtggaactataagtagcaaaaaaagaaaaagatgatgtatctcacaaccagaaatgcagaatttgatcgtcatgaaatccagatatatgaggaggtagccaaaatgcctcccttccagagaaaaacattagtattgataggagctcaaggtgtaggccgaagaagcttgaaaaacaggttcatagtattgaatcccactagatttggaactacggtgccatttacttcacggaaaccaagggaagatgaaaaagatggccaggcatataagtttgtgtcacgatctgagatggaagcagatattaaagctggaaagtatttggaacatggggaatatgaaggaaatctctatggaaccaaaattgattctattcttgaggttgtccaaactggacggacttgcattctggatgtcaacccacaagcactgaaagtattgaggacatcagagtttatgccctatgtggtatttattgcggctccggagctagagacgttacgtgccatgcacaaggctgtggtggatgcaggaatcactaccaagcttctgaccgactctgacttgaagaaaacagtggatgaaagtgcacggattcagagagcatacaaccactattttgatttgatcatcataaatgataatctagacaaagcctttgaaaaactgcaaactgccatagagaaactgagaatggaaccacagtgggtcccaatcagctgggtttactgatgattcagtaaggttaacaatgaaaattaaactcttaaaaagtgactgcaacaaataaaccttctactgagaaaatacatcacagatagaagattatctgctaagtccaggcatttttatggtgtagattgaaataatagtacacttctgaatttttatataaaatgtggttggaaggtgtactaatatataatttatcttaatttttctaactttgtatggataatctttctattcatatcacataaagaaatgcgttgaagcaaaaaaaaaaaaaaaaaaaaaaaaaa

SEQ ID NO: 278 - DNA, 4078 bp, Homo sapiens
  SITE (4037): n equals a,t,g, or c
gcggccgctgggctcaggctgtccgctctgggctccgcggcctcggccccgctgcactccacctccgccccctcggactccctcccctctgcttctactcctcctgctccagtgcggatcgtttcgcaactgcttgccactcgtcccgtgcctggctgtttttccatttcccggccccctcttcttgagtactttaccccctgcatttggggacagggactggaaaaggggcgggtggagcgtccagtggagaagaaggaagcgaggcccgcaggaggaggaggatcggcggactgtggggaggagaccccacgccaccctttctggtcatctcccctcccgccccgcccctgcgcacactccctcgcgggcgagctactttcggaccaggaaagtaagagcggccctgggtgacagcgccgcggggccagtcccggggttagccgcgcgtctgctcgcttctggtccgtcgcgctcccagccagggcacagcccggaccgaggatggcttcgaccacaacctgcaccaggttcacggacgagtatcagcttttcgaggagcttggaaagggggcattctcagtggtgagaagatgtatgaaaattcctactggacaagaatatgctgccaaaattatcaacaccaaaaagctttctgctagggatcatcagaaactagaaagagaagctagaatctgccgtcttttgaagcaccctaatattgtgcgacttcatgatagcatatcagaagagggctttcactacttggtgtttgatttagttactggaggtgaactgtttgaagacatagtggcaagagaatactacagtgaagctgatgccagtcattgtatacagcagattctagaaagtgttaatcattgtcacctaaatggcatagttcacagggacctgaagcctgagaatttgcttttagctagcaaatccaagggagcagctgtgaaattggcagactttggcttagccatagaagttcaaggggaccagcaggcgtggtttggttttgctggcacacctggatatctttctccagaagttttacgtaaagatccttatggaaagccagtggatatgtgggcatgtggtgkcattctctatattctacttgtggggtatccacccttctgggatgaagaccaacacagactctatyagcagatcaaggctggagcttatgattttccatcaccagaatgggacacggtgactcctgaagccaaagacctcatcaataaaatgcttactatcaaccctgccaaacgcatcacagcctcagaggcactgaagcacccatggatctgtcaacgttctactgttgcttccatgatgcacagacaggagactgtagacygcttgaagaaatttaatgctagaagaaaactaaagggtgccatcttgacaactatgctggctacarggaatttctcagcagccaagagtttgttgargaaaccagatggagtaaaggagtcaactgagagtcaaatacaacaattgaggatgaagatgtgaaagcacgaaagcaagagattatcaaagtcactgaacaactgatcgaagctatcaacaatggggactttgaagcctacacaaaaatctgtgacccaggccttactgcttttgaacctgaagctttgggtaatttagtggaagggatggattttcaccgattctactttgaaaatgctttgtccaaaagcaataaaccaatccacactattattctaaaccctcatgtacatctggtaggggatgatgccgcctgcatagcatatattaggctcacacagtacatggatggcagtggaatgccaaagacaatgcagtcagaagagactcgtgtgtgcaccgccgggatggaaagtggcagaatgttcattttcatcgctcggggtcaccaacagtacccatcaactaaatttcaacagtgccacttctgcattctctgttctcaaggcacctggatggtgaccctgggccgtcctctcctcctcttcatgcatgtttctgagtgcatgaagttgtgaaggtcctacatgtaatgcatatgtgatgcatcatcttatcatatattccttcctatacattgtttacacttcaactacggggatgttccacacaaacttaaattactgttggcaaaacaatagggggagattagacaaaaaaaaaawtcacaatattccaagtacaactcttcatcaagtttctctgttaatgccaagatttaacagacttaagaactattgttctctgaatgacagttgtaagagaaatgtaaattttttagaactctttgctgttaatctgttttggtttgtttggtttttktttttttttttttaaggtaaaaaaaaaatacaccttcagtttcctggtgtgatcctggttaaaatggatgatttttcattgaaagttttgctgattaacaattaaagtgggatgatatgtgggcaaaatcacttatgaaagtagaagcaagaatcagttggtttgctaccacataaagccatgctgtttttggtcaaactgtgtaaactggaaaaattcacatcatttctgagtttaatcactttaggatatattcacattgttttggtgaatttgctgaattgaattgtttttctttctcaaatctgtgatctcttttctttatcctgtttctttgttcctttcgtttgctttcttatttttcttttgttccattcttttcttacttttttcccttttccttttttggggaggctggctagtagtgtgtgagaaaagaatagaagtgaaatttgcataatgaatgtaaaagggaaataaaagtcttttgaaggtagctatactagcacttttgatcatcttcagggcccacaaaaatgttgtcaagattttaaaggtttataattctgcttaagctctagtttggacttaggtatcctaactatgttggaggtatttgcattgtttaaagttaggataaaagcaagttcctcctgtgactgcaacgtcttactgattgggacagttgccaggaggataccaacttgatagcagagggggttttatgcaaacgcactcacctccgccttggggaatgaaagggtcacttctgcatcatcactagctagttttctagtgttagagaggcttacaaatgtttgccattctcataagtgttttgaacttgatctttgtgacttgtgcttttttagcttctctcttgaatcagagtatcattgtcttcctccaaggagttagaatttcccagtttaaaacaaaaagggaaatgtcctaggttttctttgtgcttctcatttttcctttgttgattcaattcctgtgatttttgttctcttccctgaagtgctttacagtgcatggaatctccatcattgttattttaacgatagtaattcacagtcctcagaagcctatttttaaagcagaagcaaaaaagaaaaacaaaataacaaaaacaacccttcctcttttctctcatctcacctctctgtgttgattactaatcatcttagatattattgctagtggatgtatggtagatgggttgaagcttttctgataattattacacaatttaaaacaacatatatatttaaaataaatatatacagtaaatatattgagccatgttaacctgccaatgagatctgtgaaaaaataatggcctcatttttctctttttaatttcttttacccttttgtgaagcagctatacgtggcatacatgtatttaaagaaaaaaaaatagatgtagagtgttttttttacacttttaacttagcatgtggtgttgaagtattactgtagatcaagtttgtcttccgcactaagatgtgaggaaattgtgatttgttctctccaccacaaatgaattacacatttattatcttctatcattttgaaacactgcagtttaccatgggacactgtatatatttcttgccataatggtaaaggactgattgatatatttaagagttaataaatttgtgatttctgctganaaaaaaaaaaaaaaaaaaaaaaaaaaaaaaaaaaaaaaaaa

SEQ ID NO: 279 - DNA, 612 bp, Homo sapiens
  SITE (457): n equals a,t,g, or c
  SITE (531): n equals a,t,g, or c
gggcccctattcaggaccattctgtggccgtgccagagtgcatacggatttcacgccaagtccctatgacactgactccctcaaaatcaagaaaggagacatcatagacattatttgcaaaacaccaatggggatgtggacaggaatgttgaacaataaagtgggaaacttcaaattcatttatgtggatgtcatctcagaagaggaagcagcccccaagaaaataaaggcaaaccgaaggagtaacagcaaaaaatccaagactctgcaggagttcctagagaggattcatctgcaggaatacacctcaacacttttgctcaatggttatgagactctagaagatttaaaagatataaaagagagtcacctcattgaattaaatattgaaaacccagatgacagaagaaggktactatcagctgctgaaaacttccttgaagaagaaagtaagtgngtacacctactcttctccccagctgataatcagtttaatgkaaatagtataatcattagaaacaaagccccagntttatttactgrgawcatgaaagcacgctttcccataaaatagggaatttcatataaggtttggaaaccaatactctgggc

SEQ ID NO: 280 - DNA, 720 bp, Homo sapiens
  SITE (649): n equals a,t,g, or c
  SITE (665): n equals a,t,g, or c
  SITE (669): n equals a,t,g, or c
  SITE (714): n equals a,t,g, or c
ggttttttttttttttttttaaagttgtaatttttttactcactgatgaatgattaactttagggttctactgtgcaggacaaacgtgaccatataaagaaaagcatattataggacaggaggaaagttgtgctttttatcctactgaaggcttactccagggcaatacagtttaggtcaaacgtgaccaaataaagagtgccttgtttcagtctttaccactggcatctccgttgaggctgcctgaaacgagttctgcttccgtggaattgctggacgtgtgtgaccgactgtccaaagcggccagggactgcagcatgctcaggaggctgttcgaggtgggaaactgtaggtacttttctggcacataacccacttggccaactttatttcgagcctttacccagtcttccatatctccatcttcaatcacttctaacacctcatgttcctcaatggtcaactcatctggttgagaagccttgtaggaataaacaactttgcaggtgagtggataatttcttaaggtgccagaagggctggaactgctgtcatcgaaaacatccatgktatcttcaaactcttcgccttcttctctttcggtatctgcattaagcgagkggtaaagkgccattactgggcactgcangaaggcggcccatcgntcantttccagttcttcattacttgggtcatggcactctttagccatgngtccca

SEQ ID NO: 281 - DNA, 1746 bp, Homo sapiens
gggtcgacccacgcgtccggaactgtaaaatcctggacaccattggccgtggcacgttcagtgaggtccaggatcacatgctgattgggacccaaatggccatcaaaatcatccccaaggctggctcccttggcatcactctccagagagtgataagtattttaaagttactctgtcacttcaatattgtacggttgtatcaagtgattgacacccccaacaccagttatttatttagtaacggagtatgcaagaggaggacacccacgcaaccaatacaccaccatggcctcatgagggaggagaaggcctagaccatgttcaggcagattctgtcggccatgcagtagtgccatagcaaattgcgcagagacctgaacccagaaaacatcatccttgatgaggacggtaacgttaagatcgcagacttcggctttggtaccacattccatgatgggcagaagctgacagccctttgtagcacttaacccctacatggccctggaacgtttcctaggccagggctaccaatgtgccaccatggatattcagagcctcagagtaattttataccacatggtggctggggttctgcccttctgctcatgcagcattagggtcctctcagcaaaaatttaaagtggaagctatttttccccagtctacttttcctgaggtcttaaaagcctcattaaaaaactattaacagtagaccccagggagcagaccacactagaagaagttatgagggacccgtgggtgaacagtggtcaggagttgcctctgacaacatgaagaacaaatcctggaccacctgaatcccaaaacaacccagcttttggtggccatgggattccaggctgagaacctatctgtggcaatcaaagaaaaattattcagttatcccatggccacctaccttgttttggaacaaacaaaacagaagaagcggtccactatcagaccacagacccttcctcctggggatcccacttgtcctctctacattgaagtttccaccttccctctttcactgaagcgggctcatagcattcagcagaagactgtgggtgccaagtctgggcagggcctttgcccttgggagtcctgttttagacccagctccaccacgtggccctggcctcttctctgccctgtctgtgcttgcagccatggtgcccagtctggccccaccaggagacaccagaacgactgtccatgtgtctactccttggcaccttccccgcatggtgggtagatgggcagggaggggtgggaatctgtgtaaccgtggaagggaacggccctcagacccagagggtttggagcctggggtattgtcaccgacagtggccttagcctagctagcacagttagtgctgtgcatcacagcatagcttttagaggcaggatttgtagtcagtatagttgggaggcaccatggagcagggatcaccctccacctcacttgacaaggagatacaaaactatcagttcatagacaccatctgatagggaactggctcagcataggccaactgggacccaggttgccatcttgaagactttccatcacccaaatatcattcagctcttccaggtggtgagggagtaaaccagaggaggagagttgcaccaccagatataccactatggccacatcgaggaggaagaggaggcccggaccatgttcaggcagattctgtcagccctgcagtactgccacttaaaaaaaaaaaaaaaaaa

SEQ ID NO: 282 - DNA, 2038 bp, Homo sapiens
tcgacccacgcgtccgcggacgcgtgggcggcggcgtccagggtcggcagcaaccgcagccgagcccgagcgggtggcggcgccatggcgtgcgcggggctgctcaccgtgtgcctgctccggccgcccgcgccccagccccagccccagaccccgcggcacccccagctcgcgcccgacccggggcccgccggacacacgctcttccaggacgttttccgcagagcagacaagaatgatgatgggaagctctcatttgaggaattccagaattactttgccgatggggttctcagcctgggggagctgcaggaactgttcagcggcattgatgggcatctcaccgacaatttagaaacagaaaaactgtgtgactacttctcagagcacctgggtgtctaccggccggtgctggctgcattggaatcgctgaaccgtgcagtgctcgctgccatggatgccaccaagctggagtacgagagggcctccaaagtggaccagtttgtgacacgcttcctgctgcgggagacggtgagccagctgcaagcccttcagagctcgctggagggggcgtcagataccctggaggcccaggcccatggctggcggtcagatgcagagagcgtggaggcgcagagcaggctctgcggcagccggcgggcaggacgccgagccctgaggagtgtcagccggtcatccacctggtcccccggctcttctgacacagggcgcagctcacaggccgagatgcagtggcggctccaggtgaaccgcctccaggagctcatcgaccagctcgagtgcaaggccccccggctgtaacccctgcgtgaagaggacctgtccaaggggcctgacttgcacatcctcatgggccagaggcaggtccaggtggcagaggaaggcctgcaggacttccaccgagccctgcgctgctatgtggacttcacaggggcccagagccattgtctgcatgtgtccgcccagaagatgctggacggtgcctccttcaccctgtatgagttctggcaggatgaggcctcctggagaaggcaccagcagtcgcctggcagcaaggccttccagcgcatcctcatcgaccacctgcgggccccggacaccctcaccactgtgttcttcccagcctcctggtggataatgaataacaactgagccagacctgcacacgccgagggccccgggaccctgcctgcctccctctggagccttctggactggccagcccagcgcaaagaccagggcttgtctcctcctggacttgggcctggtggaagggctctcagcccagggatcagggactgggctgcttgctttctatttattattgatttatttatccctgtattttattgtttgtcacttcagcctccaagctactttggcttctgcctggctcaggagacctggattctggtccctgctgtccctgcctggctgagcgacccagggcaggtcccgtccctgtctgggtgggcctcaggccatctggccgcctagcgagggtcctgctttcttcctgctgtcttgggaccaggcttctgctcctcctcagccagcggcagaagcagggctgatgctcagggaccccccaaccctcaaaccttgcctccgaggctgggcctgagctgggtgccccgtcgccctcccaggccactaggctctgactcttccagcacccatggatgtgccagaggcctctgggttggtttgcatgtcatttgcatatcgtttgcatgccctcatcccacccattctcagggcagtatgggaagccccaaggtgacctggccaagtagcaataatttgggtccagggtcacctattgcccccagaggcctctgaaccccaggctgggaccccagcacagaggcaataaaggcagtggtcccttccaaaaaaaaaaaaaaaaaaaaaaaaaaaaaaaaaaaaaaaaaaaaaaaaaaaaaaaaaaaaaaaaaatttatattaaaaaaaaaaaaaaaaaaaaaaaaaaaaaaaaaaaaaaaaaaaaaaaaaa

SEQ ID NO: 283 - DNA, 1064 bp, Homo sapiens
  SITE (9): n equals a,t,g, or c
  SITE (10): n equals a,t,g, or c
  SITE (1058): n equals a,t,g, or c
  SITE (1061): n equals a,t,g, or c
atacttaanncctccttcagggaacaatccgctggagctccaccgcggtggcggccgctctagaactagtggatcccccgggctgcaggaattccccgggagaatatcccacacttcaaaaagactttagaagaacaacgtatgccaacagtagcctcataaagtacatggagaaacacaaggtcaagcctgacagcaaagtgttcctcttgcttcagaaactcctgaccatggatccaaccaagagaattacctcggagcaagctctgcaggatccctattttcaggaggaccctttgccaacattagatgtatttgccggctgccagattccataccccaaacgagaattccttaatgaagatgatcctgaagaaaaaggtgacaagaatcagcaacagcagcagaaccagcatcagcagcccacagcccctccacagcaggcagcagcccctccacaggcgcccccaccacagcagaacagcacccagaccaacgggaccgcaggtggggctggggccggggtcgggggcaccggagcagggttgcagcacagccaggactccagcctgaaccaggtgcctccaaacaagaagccacggctagggccttcaggcgcaaactcaggtggacctgtgatgccctcggattatcagcactccagttctcgcctgaattaccaaagcagcgttcagggatcctctcagtcccagagcacacttggctactcttcctcgtctcagcagagctcacagtaccacccatctcaccaggcccaccggtactgaccagctcccgttgggccaggccagcccagcccagagcacaggctccagcaatatgtctgcattgaaaagaaccaaaaaaatgcaaactatgatgccatttaaaactcatacacatgggaggaaaaccttatatactgagcattgtgcaggactgatagctcttctttattgacttaaagaagattcttgtgaagtttccccagcaccccttccctgcatgtgttccatygtgacttctctgataaagcgtctgatctaatccagcacttntgnacc

SEQ ID NO: 284 - DNA, 1752 bp, Homo sapiens
gtcaccgatggccagagactccaccctttagctacacttgtggcgacccatccacctacagagtcaccttccccgtctgcccccagaagctgtcactggctcctccgagtgccaaggccagcccccacaaccctggaagctgcggggagccccaggccaagttcctagaagcattctttgaagaacccccaaggaggcaatccccagtgtccaacctgggctcagaaggagaatgtccgagttcaggggctggcagccaagcccaggagcttgcagaggcctgggagggctgtagaaaggacctgctctttcagaagagtccccagaaccacaggccaccttcagtcagtgaccagactggggagaaggaaaattgctaccagcacatgggcaccagcaaaagccctgctccaggattcatccatctacgcaccgagtgtgggcccaggaaagaaccgtgtcaggaaaaggctgcccttgagagggtacttcggcaaaagcaagatgcccaagggttcacacctccccagctgggygccagccaacagtatgcatctgacttccataacgttttgaaggaggagcaggaggcactgtgcttggatctgtggggcacagagaggcgagaggagaggagggagcctgagccccacagcaggcaaggacaagctctgggggtsaagagagggtgccagctccatgagcccagctcggcactgtgtccagctccatccgccaaagtcatcaagatgcccaggggtggcccccaacagctggggacgggggccaacactccagccagggtctttgtggccctctctgattacaaccccctggtgatgtctgccaacctcaaggctgcagaggaggagctggtcttccagaaaargcagttgctaagagtgtggggctctcaggacacccatgatttctacctcagcgagtgcaacaggcaagtgggcaatatccccgggygcctagtggctgagatggaggtggggacagagcagactgataggaggtggcgttctccggcccaagggcacctgccttctgtggcccacctcgaggactttcaggggctcaccatcccccagggttcctccctggtgctccaggggaactccaagagactcccactgtggactccaaagatcatgatagcagctctggactatgatcctggggatgggcaaatggggggccaggggaagggcaggctggcgctgagggcaggagacgtggtcatggtttacgggcccatggatgaccaaggattctattatggagagttgggcggccacaggggcctggttcctgcccacctgctggatcacatgtccctccatggacactgagcaagcatccttgcccaggtagtggcctctggctgctcacaccctgccagaggagaagcaagcgttcagaccctcacaccagcacccctcctcaccaccataagtagcatgtgctccaagtgccactgtgttaaactgatggtagtccttaagygtcccctaggctctgaaagtagcaggacttaagcctgagttatttgcaaaagcaaacacaacaagccaacccctgagagtctgagaagccatttcaaagttgctgataactatggcaggtatacggagaagcgcctttttctgtggccaatgtgtgttttctctgggaggttaaggttatctgtccattgccttgtacgaaagtctcaagaaaagtctacatcttaaaaaaraaaaaaaa

SEQ ID NO: 285 - DNA, 1638 bp, Homo sapiens
ccacgcgtccgcggacgcgtgggcggacgcgtgggcggacgcgtgggtgagtccagtgagccgacagtccataagaaactcccagaagcacagccccacttcagagcccacccccccgggggatgccctaccaccagtcagctccccacatactcacaggggctaccagccaacaccagccatggccaagtacgtcaagatcctgtatgacttcacagcccgaaatgccaacgagctatcggtgctcaaggatgaggtcctagaggtgctggaggacggccggcagtggtggaagctgcgcagccgcagcggccaggcggggtacgtgccctgcaacatcctaggcgaggcgcgaccggaggacgccggcgccccgttcgagcaggccggtcagaagtactggggccccgccagcccgacccacaagctacccccaagcttcccggggaacaaagacgagctcatgcagcacatggacgaggtcaacgacgagctcatccggaaaatcagcaacatcagggcgcagccacagaggcacttccgcgtggagcgcagccagcccgtgagccagccgctcacctacgagtcgggtccggacgaggtccgcgcctggctggaagccaaggccttcagcccgcggatcgtggagaacctgggcatcctgaccgggccgcagctcttctccctcaacaaggaggagctgaagaaagtgtgcggcgaggagggcgtccgcgtgtacagccagctcaccatgcagaaggccttcctggagaagcagcaaagtgggtcggagctggaagaactcatgaacaagtttcattccatgaatcagaggaggggggaggacagctaggcccagctgccttgggctggggcctgcggaggggaagcccacccacaatgcatggagtattatttttatatgtgtatgtattttgtatcaaggacacggagggggtgtggtgctggctagaggtccctgcccctgtctggaggcacaacgcccatccttaggccaaacagtacccaaggcctcagcccacaccaagactaatctcagccaaacctgctgcttggtggtgccagccccttgtccaccttctcttgaggccacagaactccctggggctggggcctctttctctggcctcccctgtgcacctggggggtcctggcccctgtgatgctcccccatccccacccacttctacatccatccacaccccagggtgagctggagctccaggctggccaggctgaacctcgcacacacgcagagttctgctccctgaggggggcccgggaggggctccagcaggaggccgtgggtgccattcgggggaaagtgggggaacgacacacacttcacctgcaagggccgacaacgcaggggacaccgtgccggcttcagacactcccagcgcccactcttacaggcccaggactggagctttctctggccaagtttcaggccaatgatccccgcatggtgttgggggtgctggtgtgtcttggtgcctggacttgagtctcaccctacagatgagaggtggctgaggcaccagggctaagcaattaaaccagttaagtctcccaggaaaaaaaaaaaaaaaaaaaaaaaaaaaaaaaaaaaaaaaa

SEQ ID NO: 286 - DNA, 2029 bp, Homo sapiens
ggcacgagctcgtgccggacgacgctgcggtctttggggcttgctcctacctgccaggcgcggcctcccgctggctccctggccgcgcggcgcctcctccaggccccagcacaccctgccaaccccaccgccgcggctgcccccaccgggaccgaggagctacctgtgcaccctgcctccggctctcctgagcagagagatcctgatggctgactcagaagcactcccctcccttgctggggacccagtggctgtggaagccttgctccgggccgtgtttggggttgttgtggatgaggccattcagaaaggaaccagtgtctcccagaaggtctgtgagtggaaggagcctgaggagctgaagcagctgctggatttggagctgcggagccagggcgagtcacagaagcagatcctggagcggtgtcgggctgtgattcgctacagtgtcaagactggtcaccctcggttcttcaaccagctcttctctgggttggatccccatgctctggccgggcgcattatcactgagagcctcaacaccagccagtacacatatgaaatcgcccccgtgtttgtgctcatggaagaggaggtgctgaggaaactgcgggccctggtggctccatctccaacatgtatgctgtaaatctggcccgctatcagcgctacccggattgcaagcagaggggcctccgcacactgccgcccctggccctattcacatcgaaggagtgtcactactccatccagaagggagctgcgtttctgggacttggcaccgacagtgtccgagtggtcaaggctgatgagagagggaaaatggtccccgaggatctggagaggcagattggtatggccgaggctgaggcaacagggtgctgtgccgttcctggtcagtgccacctctggcaccactgtgctaggggcctttgaccccctggaggcaattgctgatgtgtgccagcgtcatgggctatggctgcatgtggatgctgcctggggtgggagcgtcctgctgtcacagacacacaggcatctcctggatgggatccagagggctgactctgtggcctggaatccccacaagctcctcgcagcaggcctgcaatgctctgcacttcttctccaggatacctcgaacctgctcaagcgctgccatgggtcccaggccagctaccttttccagcaggacaagttctacgatgtggctctggacacgggagacaaggtggtgcagtgtggccgccgtgtggactgtctgaagctgtggctcatgtggaaggcacagggcgatcaagggctggagcggcgcatcgaccaggcctttgtccttgcccggtacctggtggaggaaatgaagaagcgggaagggtttgagctagtcatggagcctgagtttgtcaatgtgtgtttctggttcgtaccccccagcctgcgagggaagcaggagagtccagattaccacgaaaggctgtcaaaggtggcccccgtgctcaaggagcgcatggtgaaggagggctccatgatgattggctaccagccccacgggacccggggcaacttcttccgtgtggttgtggccaactctgcactgacctgtgctgatatggacttcctcctcaacgagctggagcggctaggccaggacctgtgagccttctctgtcttgctgccggccttgataccacccctcacccgcagagtcactgcattccctcccagcctttgaggccgggtgcagtggctcacgcctgtaatcccagcactttgggaggccgaggcgggtggatcacttgaggtcaggagttcgagaccagcctggccaataaggtgaaaccctgtctctactaaaaatacaaaaattagccgagcatggtggcctgtgcctgtaaacccagctactcaggaggttggggcagaattgcttgaacccagggggcagaggttgcagtgagccgagattgcacccctgcactccaggctgggcaacagtacgagactctgttccaaaaaaaaaaaaaaaaaa

SEQ ID NO: 287 - DNA, 503 bp, Homo sapiens
  SITE (391): n equals a,t,g, or c
  SITE (407): n equals a,t,g, or c
  SITE (449): n equals a,t,g, or c
  SITE (457): n equals a,t,g, or c
atctattttaattaagagccaagatcatttctaacatttattgttaaaataggtgctgttcctataatcagatgttcaagaggaacagcagcagaaatggtagcagtgaaactagacaagaaacttcgagaaaatctaagagatgcaagaaacagtctttttacaggtgatacacttggagctggccaattcagcttccagaggcccttattagtccttgttgacagaaacatagatttggcaactcctttacatcatacttggacatatcaagcattggtgcacgatgtactgggtaagagactaaatgcagcacttattactggaaatatagtaacatgcagtgttccctttaatttaaaattaacatcatgggctacagaaacaaaanggagaaggatgggaantgagaccttggaacaaacagtgatgggggtttgggtattacnggggtgtnggaagcccgggaaatgtggaagcctttaagtttagtttccaattta

SEQ ID NO: 288 - DNA, 376 bp, Homo sapiens
  SITE (174): n equals a,t,g, or c
  SITE (366): n equals a,t,g, or c
  SITE (370): n equals a,t,g, or c
tcgacccacgcgtccgcctgacgaaaaagagggttacgctgctcattttgagtatctgggccatcgccatctttatgggggctgtccccaccctgggctggaattgcctctgtgacatctctgcctgctcttccctggcccccatttatagcaggagttacctcattttctggnacagtgtccaaccttgtgggcctttttcatcatggttgtggtgtacctggcggatctacatgtatgtcaagaggaaaaccaatgttttgtgctccacatacgagtgggtccatcagccgccggaagacacccatgtaagctggatgtaagacagtggatggactgtattgaggggacctttgttcgtgtggntggnacccca

SEQ ID NO: 289 - DNA, 982 bp, Homo sapiens
ccacgcgtccgatttagtctggaagctcttcaaacaatacataaacaaatggatgatgacaaagatggtggaattgaagtagaggaaagtgatgaattcatcagagaagatatgaaatataaagatgctactaataaacacagccatctgcacagagaagataaacatataacgattgaggatttatggdaacgatggaaaacatcagaagttcataattggacccttgaagacactcttcagtggttgatagagtttgttgaactaccccaatatgagaagaattttagagacaacaatgtcaaaggaacgacacttcccaggatagcagtgcacgaaccttcatttatgatctcccagttgaaaatcagtgaccggagtcacagacaaaaacttcagctcaaggcattggatgtggttttgtttggacctctaacacgcccacctcataactggatgaaagattttatcctcacagtttctatagtaattggtgttggaggctgctggtttgcttatacgcagaataagacatcaaaagaacatgttgcaaaaatgatgaaagatttagagagcttacaaactgcagagcaaagtctaatggacttacaggagaggcttgaaaaggcacaggaagaaaacagaaatgttgctgtagaaaagcaaaatttagagcgcaaaatgatggatgaaatcaattatgcaaaggaggaggcttgtcggctgagagagctaagggagggagctgaatgtgaattgagtagacgtcagtatgcagaacaggaattggaacaggttcgcatggctctgaaaaaggccgaaaaagaatttgaactgagaagcagttggtctgttccagatgcacttcagaaatggcttcagttaacacatgaagtagaagtgcaatactacaatattaaaagacaaaacgctgaaatgcagctagctattgctaaagatgaggcagaaaaaaaaaaaaaaa

SEQ ID NO: 290 - DNA, 1050 bp, Homo sapiens
  SITE (942): n equals a,t,g, or c
  SITE (1023): n equals a,t,g, or c
  SITE (1041): n equals a,t,g, or c
gttctagatcgcgatctagaacttagggcagctgaaggctcggttcatgccgtgcccccgggcagttctggtgaggctaagcaagaggcctctgcatcttgacacctaggagagcagggacggagtctcccagggtggaggaccatgctgcgccgcaagccctccaatgccagtgagaaggagcccactcagaagaaaaagctctcccttcagcgctccagcagcttcaaggattttgccaaatccaaacccagctcccccgtggtgagcgagaaggagtttaatctggatgataacattccagaagatgactcaggtgtccccaccccagaagatgctgggaagagtggcaaaaagctggggaagaagtggagggcagtgatttcccgaaccatgaacaggaagatgggcaagatgatggtgaaggccctgtcagaagagatggcagacactctrgaggagggctytgcctccccgacatctccagactacagcctggacagccctggccctgagaagatggcgctggccttttctgagcaagaggagcatgaacttccggtgctcagccgccagcatgcaacaggcagtgagctctgcagccccagcccaggttctggcagcttcggggaggaaccacctgccccccagtacacagggcctttctgtggccgggcacgagtccacaccgacttcactcccagcccctatgaccacgactcgctgaaactgcagaaaggagatgtgatccagatcattgaaaagccacctgtgggcacgtggctgggcctactcaatggcaaggtgggctctttcaaattcatctatgtgggatgtgctgcccgaggargccgtggggcatgcccgccccagccgccgacagarcaarggcaagaggcccaagcctaagacctgcatgagctgstggarcgcatcsgsctnggaaggarcacacatycamcctcctgctcaatggctaccagacacttggaagactttcaaaagaacttgcgagaaacacancttcaatgagcttgaaanatcattgga

SEQ ID NO: 291 - DNA, 454 bp, Homo sapiens
  SITE (368): n equals a,t,g, or c
  SITE (398): n equals a,t,g, or c
  SITE (448): n equals a,t,g, or c
gatcacaaagaaaatctttaagtcccaccttaagtcaagtcggaattccacttcggtcaaaaagaaatctagccgcaacatattcagcatcgtgtttgtgttttttgtctgttttgtaccttaccatattgccagaatcccctacacaaagagtcagaccgaagctcattacagctgccagtcaaaagaaatcttgcggtatatgaaagaattcactctgctactatctgctgcaaatgtatgcttggaccctattatttatttctttctatgccagccgtttagggaaatcttatgtaagaaattgcacattccattaaaagctcagaatgacctagacatttccagaatcaaaagaggaaatacancacttgaaagcacagatactttggtgagtnctaccctcttccaaagaaagaccacgtgtgcatgttgtcatcttcaattncataac

SEQ ID NO: 292 - DNA, 640 bp, Homo sapiens
ggaaggtgctccccctctctgtgacatgcatccaatgagagcactgtttctcattcccagaaaccctcctccccggctgaagtcaaaaaaatggtcgaagaagttttttagttttatagaagggtgcctggtgaagaattacatgcagcggccctctacagagcagcttttgaaacatccttttataagggatcagccaaatgaaaggcaagttagaatccagcttaaggatcatatagatcgtaccaggaagaagagaggcgagaaagatgaaactgagtatgagtacagtgggagtgaggaagaagaggaggaagtgcctgaacaggaaggagagccaagttccattgtgaacgtgcctggtgagtctactcttcgccgagatttcctgagactgcagcaggagaacaaggaacgttccgaggctcttcggagacaacagttactacaggagcaacagctccgggagcaggaagaatataaaaggcaactgctggcagagagacagaagcggattgagcagcagaaagaacagaggcgacggctagaagagcaacaaaggrgagagcgggaagctagaaggcagcaggaacgtgaacagcaaaaaaaaaaaaaaaaaaaaaaaaaaaagtcgtatcga

SEQ ID NO: 293 - DNA, 887 bp, Homo sapiens
  SITE (715): n equals a,t,g, or c
  SITE (786): n equals a,t,g, or c
  SITE (805): n equals a,t,g, or c
  SITE (824): n equals a,t,g, or c
  SITE (863): n equals a,t,g, or c
gcccggattgcccgagacttgcagggatccccagagcacaagactaaacctggaaaagccccagaaaaatcgagagagttttccccctacatcgacatcaatggtacttgtgacaagctgactcccttctggttcaccctctggagccaacggggaaagtgtgaagaccagaaggtggaatgcctgtacgaggcgctgaagagagctggagacaggctcctgggctccttccccacggccgtgcctctggctctccactcctccatcagctacctcggcttcttcgtcagtggcagccccgcagacgtcatccgggaattcgccatgaccttcgccacggaagcatctctcttagcagactgctccgtgaagccttgcaccaaacagctgcatctgaccttggcccacaagttctacccccaccaccagaggacgctggagcagctggccagagccatccccctgggccacagctgccagtggaccgcagcactctactcccgagacatgcgctttgtgcactaccagaccctgagagccctattscagtacaaaccccagaacgtggatgagctgacgctaagtcctggtgactacatctttgtggaccccacgcagcaggacgaagccagcgagggctgggtgattgggatctcacagcggacgggctgccggggcttcctgccggaaaattacacgggttcgagccagtgantttggacacgtgggtgaagcacaggatgttacaccttcagtctaagccacagacctgaattccagaaaggntggtgaagccagcagcagntgcagcgggggatttcttncacaaacggcaaagatcttagcagtttacaaggctttgnaggttacgtttgcaaggaagaatt

SEQ ID NO: 294 - DNA, 2317 bp, Homo sapiens
ggcacgagaccgcacggggtatggtccccgggtccgagggcccggcccgcgccgggagcgtggtggccgacgtggtgtttgtgattgagggtacggccaacctgggaccctacttcgaggggctccgcaagcactacctgctcccggccatcgagtattttaatggtggtcctcctgctgagacggacttcgggggagactatggggggacccagtacagcctcgtggtgttcaacacagtggactgcgctcccgagtcctacgtacaatgtcacgctcccaccagcagcgcctatgagtttgtcacctggctcgatggcattaagttcatgggcgggggtggtgagagctgcagcctcatcgcggaaggactcagcacagccttgcagctgtttgatgacttcaagaagatgcgcgagcagattggccagacgcaccgggtctgcctcctcatctgcaactcacccccatacttgttgcctgctgttgagagcaccacgtactctggatgcacaactgagaatcttgtgcagcagattggggagcgggggatccacttctccattgtgtctccccggaagctgcctgcgcttcggcttctgtttgagaaggcagcccccccggccttgctggagccgctgcagcctccgacagatgtgagccaggacccgaggcacatggtgctggttcggggactcgtgctgcctgttgggggtggctcagccccaggccccctccagtcaaagcagccagtccccctgcctcccgccgcaccctcaggtgccactctctcagcagccccccagcagcctctgccccccgtccccccgcagtaccaggttcccgggaacctgagtgcagctcaggtggccgcgcagaatgcagtggaggctgccaagaaccagaaggctgggctgggccctcgcttctcgcccatcacccctctccacaagctgctcccggagtgggtccccccttcagccaggccccagctccccaactacccccaggaccccctggcgcccccaagccaccacctgcttcccagcccagtctggtctccactgtggcccctggctccggcctggctcccacggcacagcccggggcaccgtccatggcaggcactgtggccccaggaggggtgagcggcccttccccagcccagctgggagccccagccctcggtgggcagcagtcagtctccaataagcttctggcctggagcggggtcctggagtggcaagagaaacccaaacctgcctcagtggatgccaacaccaagctgacgcggtcactgccctgccaggtctacgtgaatcatggcgagaacctgaagacggagcagtggccccagaagctgatcatgcagctcatcccccagcagctgctgaccaccctgggccctttgttccggaactcaaggatggtccagttccatttcaccaacaaggacctggagtctctcaaaggcctctaccgcatcatgggcaacggcttcgcgggctgcgtgcacttcccccacacggcgccctgtgaggtgcgcgtgctcatgctcctgtactcgtccaagaagaagatcttcatgggcctcatcccctacgaccagagcggcttcgtcaacggcatccggcaggtcatcaccaaccacaagcaggtccagcagcagaagctggagcagcagcagcgaggaatggggggacagcaggcacccccagggctggggcccattctggaggaccaagccaggccctcacagaatctgctccagctccgcccaccgcagccccagcctcagggtaccgtaggggcctctggggccacggggcagccccagccccaaggtactgcccagcccccgccaggtgcccctcaaggccctcctggagcagcttctggcccaccccctcctggacccatccttcggccccagaaccctggggccaaccctcagctgcgaagcctcctcctcaacccaccaccgccgcagactggggtgcccccaccccaggcctccctccaccacctccagccaccaggggctcctgcgctgctgcctccgccgcaccagggcctggggcagccccagttggggcccccactcctgcatccaccacctgcccagtcctggcccgcacaacttccccctcgggctccactgccaggtcagatgctgctgagcgggggtccccggggcccggtcccccagccgggcctgcagcccagcgtcatggaggacgacatcctcatggatctcatctgaatccccaacacccaataaagttcctttttaacacacaaaaaaaaaaaaaaaaaa

SEQ ID NO: 295 - DNA, 1707 bp, Homo sapiens
gcaagtgccttgaaacagtatttgaggagtcttccagagcctctcatgacctatgagttacatggagatttcattgttccagccaaaagcggyagcccagaatctsgtgttaatgcgatccatttcttggtacacaaactgccagagaagaataaagagatgttggatattttggtgaaacacttaacaaatgtttcaaatcactccaagcagaacctgatgactgtggcaaacttaggagtggtgtttggaccaactctgatgaggccacaggaagaaactgtcgctgccctcatggacttgaagtttcagaatattgttgtggaaatcttaattgaaaaccatgaaaagatttttcggacgccgcccgatactacattccctgagcccacctgcctgtcagcatcacccccaaatgcgccaccaaggcagtcgaagagacaaggccagagaaccaagaggcccgtggcyktctacaatctttgtctggagctggaagatggtgacaatccttacccttccaaggaggacacccctaccagyagtctggactcactttcctccccgtctcccgtgactacagctgtccctgggcctcctggaccagacaaaaaccaccttctggcagatggagggagctttggagactgggcatccactatcccaggccagacccgatcgtctatggtccagtggcttaacccacagtctccaaccacaacaagctccaactcagctgtgacacctctttcacccgggtcgtcccctttccccttttctcctcctgctactgtagcggacaagccacctgaaagcatccgcagtcggaaggctcgagccgtgtatccgtgtgaagcagaacacagctcggaattatcttttgaaataggagcaatttttgaggatgtacaaacctccagggaacctggctggctagaagggactctgaacggcaagagggggctgattccacagaactacgtcaagctgctgtagctcctggcctcagagcccctgctgaccctggcacccagggacctgcctgggggcagagagctgtcttcctcctccgaggctctgggctgcacccacaggtacctccacacttgggagttaccatcatcacagtcagccctgggggtggggggtggtgggcagggatgggacgcaccacacagaactgtgattgtggatcaggaggggaatgtcaggattcgcaaaatggacttttcatttgtcaagtattgggacttgtgatttttaattatccagcatatagaatgagagggagggcagccttctgccacctgtgtcgcctccactggcagtcacgccaccagagccaccctggctccctctcctccctgagcacctgctgctgcgattttaaagggaactgtactactcgcagtgataggtttgcagagtgtgtgcttggctgtggcagcctagcttggagaagctgctgttggtgcaagggagatggtctcaagtcagagggaagcagagacgcgcgtctcaagcctgcccttcctagacggccacctgcaggaccccacactcactgcactggcagcgtgcactggcgtatttgtaacaggcttctcggtgctcctcacccgtgtgctgttttccaaacaccacctttttgcctcaaggtctctgtaaatgaaataaactgtaatttactaaaaaaaaaaaaaaaaa

SEQ ID NO: 296 - DNA, 1568 bp, Homo sapiens
  SITE (404): n equals a,t,g, or c
  SITE (416): n equals a,t,g, or c
ggaataacccttactaaaggtaacacaagctggagctccaccgcggtggcggccgctctagaactagtggatcccccgggctgcaggaattcggcacgagccgacgcgcccaaggaccctgtgcctgccctgcccacacacccccctgcccaggagcaggactgcgtggtggtcatcacccgagaggtgccacatcagaccgcctccgacttcgtgcgggactcggcggccagccaccaggcggagcccgaggcgtacgagcggcgcgtgtgcttcctgcttctgcaactctgcaacgggctggagcacctgaaggagcacgggatcatccaccgggacctgtgcctggagaacctgctgctggtgcactgcaccctccaggycggccccgggcccgcccccgnccccgacccggntcccgcccccgccgccgccgcgcctccctgctcctctgccgccccgcctgctggtggactctcagtcccgcaccggcccgactccccggaagggccccgrgagaagcagctgccccggctcatcatcagcaactttttgaaggccaagcagaagccgggcagcaccccaaacctgcagcagaagaagagccaggcccggctggcccccgagatcgtgtctgcttcccagtaccgcaagttcgatgagttccagacaggcatcctcatctacgagctgctgcaccaacccaacccgttcgaggtgcgcgcccagctgcggkagagagactaccggcaggaggacctgccgccgctgcccgcgctgtccctctactcacccggcctgcagcagctggcacatctgctactggaggccgaccccatcaagcgtatccgcatcggcgaggccaagcgcgtgctgcagtgcctgctgtgggggcctcggcgcgagctggtgcagcagccgggcacctcggaggaggcgctgtgsgcagcgctgcacaactggatcgacatgaagcgggccctgatgatgatgaagtttgcggagaaggcggtggatcgcaggcggggcgtggagctggaggactggctttgctgccagtacctggcgtctgcggagcccggggccctcttacagtcgctgaagctcctgcagcttctgtgagccaagccccagcctgcaccgtcgctgccccttccctgcctaaccctttcctgtctcgccttggaagcacccatgtctccctgggaaatggtacagatgactgggatacctggatgtaaaatatataaatatatatatagaaaatacatataccatatataaatatgaaagactaaggatgctgttgcccgtccacactcgtctcctctctgcactaagtcctccctgttttcttctgtaattatacacatttccagttccatgcaacgtcctgaggacagttctgtgaactgaatgcagcctggacactggcctcaataccttgtttaggatttcttcacccttttgtcaaattgttatttaaagaaaaaaaaaaaagaagaaaattccattaaaattttttttggttgagtcatgarmaaagctctttatccttaaaaaaaaaa

SEQ ID NO: 297 - DNA, 537 bp, Homo sapiens
gaaaacctgagaatattttagtatcccagtcaggaattactaagctctgtgattttggttttgcacgaacactagcagctcctggggacatttatacggactatgtggccacacgctggtatagagctcccgaattagtattaaaagatacttcttatggaaagtatgtgtattttgggatcctgtcagcctttcctagacctgtggatatctgggctttgggctgtatgatcattgagatggccactggaaatccctatcttcctagtagttctgatttggatttactccataaaattgttttgaaagtgggcaatttgtcacctcacttgcagaatatcttttccaagagccccatttttgctggggtagttcttcctcaagttcaacaccccaaaaatgcaagaaaaaaatatccaaagcttaatggattgttggcagatatagtycatgcttgtttacaaattgatcctgctgacaggatatcatctatgawcttttgcatcatgagtattttactagagatggatttattga

SEQ ID NO: 298 - DNA, 1349 bp, Homo sapiens
  SITE (5): n equals a,t,g, or c
  SITE (20): n equals a,t,g, or c
  SITE (412): n equals a,t,g, or c
  SITE (831): n equals a,t,g, or c
taccnaatctcaattttgtnatacgcctcactatagggaaagctggtacgcctgcaggtaccggtccggaattcccgggtcgacccacgcgtccgatcgtgaagctctttgaggtgattgagactgagaagacgctgtacctggtgatggagtacgcaagtgctggagaagtgtttgactacctcgtgtcgcatggccgcatgaaggagaaggaagctcgagccaagttccgacagattgtttcggctgtgcactattgtcaccagaaaaatattgtacacagggacctgaaggctgagaacctcttgctggatgccgaggccaacatcaagattgctgactttggcttcagcaacgagttcacgctgggatcgaagctggacacgttctgcgggagccccccatatgccgncccggagctgtttcagggcaagaagtacgacgggccggaggtggacatctggagcctgggartcatcctgtacaccctcgtcagcggytccctgcccttcgacgggcacaacctcaaggagctgcgggagcgagtactcagagggaagtaccgggtccctttctacatgtcaacagactgtgagagcatcctgcggagatttttggtgctgaacccagctaaacgctgtactctcgagcaaatcatgaaagacaaatggatcaacatcggctatgagggtgaggakttgaagccatacacagagcccgaggaggacttcggggacaccaagagaattgaggtgatggtgggtatgggctacacacgggaagaaatcaaagagtccttgaccagccagaartwcaacraagtgaccgcancctacctcctgctgggcaggaaaactkargarggtggggaccggggcgcccmagggctggccctggcacgggtgcgggcgcccarcgacaccaccaacggaacaagttccagcaaaggcaccagccacagcaaagggcagcggagttcctcttccacctaccaccgccagcgcaggcatagcgatttttgtggcccatcccctgcacccctgcaccccaaacgcagcccgacgagcacgggggaggcggagctkaaggaggaacggctkccaggccggaaggcgagctkcagcaccscggggagtgggagtcgagggctgcccccctccagccccatggtcagcagcgcccmcaaccccaacaaggcaragatcccagagcggcggaaggacagcacgagcacccccaacaacctccctcctagcatgatgacccgcaraaacacctacgtttgcacagaacgcccgggggctgagcgcccgtcmctgttgccaaatggaaaaaaaaaaaaaaaaaaa

SEQ ID NO: 299 - DNA, 734 bp, Homo sapiens
ggttggtccagaagaaagatacaggccatatctatgcaatgaagatattgagaaagtctgatatgcttgaaaaagagcaggtggcccatatccgagcagaaagagatattttggtaraagcagatggtgcctgggtggtgaagatgttttacagttttcaggataagaggaatctttatctaatcatggaatttctccctggaggtgacatgatgacattgctaatgaagaaagacaccttgacagaagaggaaacacagttctacatttcagagactgttctggcaatagatgcgatccaccagttgggtttcatccatcgggatattaagccagacaaccttttattggatgccaagggtcatgtaaaattatctgattttggtttatgtacgggattaaagaaagctcacaggactgaattttatagaaatctcacacacaacccaccaagtgacttctcatttcagaacatgaactcaaagaggaaagcagaaacttggaagaagaacaggagacaactggcatattccacagttgggacaccagattacattgctccagaagtattcatgcagactggttacaacaaattgtgtgactggtggtctttgggagtgattatgtatgaaatgctaataggatatccacctttctgctctgaaacacctcaagagacatacagaaaagtgatgaactggaaagaaactctggtatttcctccagaggtacct

SEQ ID NO: 300 - DNA, 3163 bp, Homo sapiens
ggcacgagctgggaccactgccccaccccgagaggagagaacagggggagtcgggggctacccagcagttggagccagagaggaccgaatgagccacccctccggaccctattcccaagcatctgcagctgccccccagcctgctgcagcccgccagccaccacccccagaggaggaggaagaggaagccaacagctacgattcggatgaagcaaccaccctgggtgccctggaattcagccttctctacgaccaggacaacagctccctgcagtgcaccatcattaaggccaagggcctgaagcccatggattcaaacggcttggctgatccctacgttaagctgcacctcctgccgggagccagcaagtccaacaagcttcgtacaaaaactctgcggaatacccggaaccccatctggaatgagaccctcgtgtatcacggcatcaccgatgaggacatgcaaaggaagaccctcaggatctccgtctgtgatgaggacaaatttggccacaatgaatttattggtgagaccagattctccctcaagaaactgaagcccaaccagaggaagaatttcaacatctgcctggagcgagtgattcctatgaaacgtgctgggaccaccgggtcagcccgaggcatggccctttatgaggaagagcaggtggagcgtgttggtgacatcgaggagcgtggcaagatcctggtctccctcatgtacagcacacagcagggaggcctcattgtgggcatcatacgctgcgtgcacctggctgccatggacgctaatggctactcagacccattcgtcaagctctggctgaaaccggacatgggaaagaaggccaaacacaagactcaaattaaaaagaaaaccttgaatcccgaattcaatgaggagtttttctatgacatcaaacacagtgacctggcaaagaagtcactggacatttcagtctgggactatgacatcggcaagtccaatgattacatcggaggctgccagctggggatctctgccaagggagagcgcttaaaacactggtacgagtgtctgaaaaataaagacaagaagatagagcgctggcaccagctacagaatgagaaccacgtgtcaagtgattaggctagtgcccaggtccccatctccatgtcccgggtcccccccagcctgctctagctgcccaccgcaccctgatctctcttctctatgcctacctccccccataccctgctgatctccctgagcctgcctttgagcccccgtcacgttgggcactgctgccaaagactccctcctccctgatgctgggatgtgggctctgaatacagcccctctctcatccctgggatggagcaatggggatggggttggggagacgcttacaaagaggttgatcatttaataacctctcagtttgggtaaattacaaaggttcttcatcatttaggactgtttttagaccctcctagccttgaacacacacatgtacacacacacacacacacacacacacacaccctttcattccctgtgttgtgtctctgtatatccccagttgtcagcagacccggacaatgctgtgagagaagcattggggcacaaatagagcctccgggctcccactgccccctgagatgtacaccctgattgccaggaaaacagactgctgtgttcagtaacacacctgtgtgcttcctagcaaaacaaaaacaaacgacaacaacaaaaaacccttcctctgtcaccttttctcctcctccctcttctttcccttccatgatagtagattctctctttctcagcctctcccctctcctttctctccctgcctttcttccctttgcctttctctctctctaaagcagtaacaccgcaaaaacgacagcaaaaaaagtgtatgttaacctagcctcacccccttgctctcaccagcctgaccaggaaactgagaaactggcccaaacctgagattccacttgggcccacgcttcttaactgacccactcctcccgttggcagaaccagacattcccagggcttgggccaatggctggcactgccctgagtgcatggcagcatccctcaagctgtgtagatgccccatagaggactctctcatccgtgggctccccgggtgggcacggaggcatttagaagaccagggccatgggtctgaggaagcctcagccaaagcctccagcctttctcctttctccgctcttaggtaaatgaacaagctaccctcctccccaatgcccttgactctgtttcattgactcttttgcatcccatctctcactcagaaccccctccagtctctctgtctctctttgtctgtctctctgtctcctgcactctcgttactaagcttcctgggagaatcaaataatatcatggctatggaacagtagagagagacaggcctgatgccaaaggctttgggctcatcatcaatctttcactttcttcctataaaaaaaattattttataaaggaggaaaaggcaatgtgggcaaacattacaaatttgaggttgaagtcaggcaatcttcaatgccctgtgagaaaggctccgatttcccaattttgatgaagtcttccctcatgaaaatcactcccagtcatcccaaacccctgacattctctacagaagcatcagacagatactcaaactctcactttccccaaatcacatctcttaacttttcaatgccctccaccctcagctccctgcacaattcatgggaggactcatttcttgccttgaataaccattttctaaacatcgagctcttcaccttccccaaggtggccaacagcttcctggctgccatctttccttttgaccttatctttccccattagtccctggtggcacctactctcagcccacctccctcaccacagtttccccttaggagacagcatgctggctgtgtcgcccaagcctgatgctggtgtaggcgctggaatcagcatgcagcaagctcacagtgcccctagtatgggtgcccgctgtccccgacaaatgtaaccacctccctgcctagaatacacacacgtcctccggtgcatgcacaaccacccagcatctttctttgtgatgatgtagccaaaaataaagtaggagcatccaagaaaaaaaaaaaaaaaaaa

SEQ ID NO: 301 - DNA, 902 bp, Homo sapiens
  SITE (35): n equals a,t,g, or c
  SITE (92): n equals a,t,g, or c
  SITE (98): n equals a,t,g, or c
ttgccatctcagttaggaaattacccctcactaangggaacaaaagctggagctccaccgcggtggcggccgctctagaactagtggatccnttgttntgcaggaattcggcacgaggaaagaacaagctttcttactcaggggggaaaacgttttgagcttcaacatggcctcgctgtgatatctgatcactggagattccatcgttagtgctgaggcagtatgggatcacgtcaccatggccaaccgggagttggcatttaaagctggcgacgtcatcaaagtcttggatgcttccaacaaggattggtggtggggccagatcgacgatgaggagggatggtttcctgccagctttgtgaggctctgggtgaaccaggaggatgaggtggaggaggggcccagcgatgtgcagaacggacacctggaccccaattcagactgcctctgtctggggcggccactacagaaccgggaccagatgcgggccaatgtcatcaatgagataatgagcactgagcgtcactacatcaagcacctcaaggatatttgtgagggctatctgaagcagtgccggaagagaagggacatgttcagtgacgagcaactgaaggtaatctttgggaacattgaagatatctacagatttcagatgggctttgtgagagacctggagaaacagtataacaatgatgacccccacctcagcgagataggaccctgcttcctagagcaccaagatggattctggatatactctgagtattgtaacaaccacctggatgcttgcatggagctctccaaactgatgaaggacagcgctaccagcacttctttgaggcctgkcgcctcttgcagcagatgattgacattgcttatcgatggtttcctttttgactcca

SEQ ID NO: 302 - DNA, 2572 bp, Homo sapiens
ggcggcactcattcactgcacttggtccgagacagaaaacgtttgagttgttccacacacaccccctctaaatgtcgagaagccccaggttgcatgatggaatttgaacattacttcaagaggttttgtattttggattagttaattgggtttgtcctctgctgactgtttcttcggatgcattttttggtgtgctcttgagggattaaatgcaaagagatcacaccatggactacaaggaaagctgcccaagtgtaagcattcccagctccgatgaacacagagagaaaaagaagaggtttactgtttataaagttctggtttcagtgggaagaagtgaatggtttgtcttcaggagatatgcagagtttgataaactttataacactttaaaaaaacagtttcctgctatggccctgaagattcctgccaagagaatatttggtgataattttgatccagattttattaaacaaagacgagcaggactaaacgaattcattcagaacctagttaggtatccagaactttataaccatccagatgtcagagcattccttcaaatggacagtccaaaacaccagtcagatccatctgaagatgaggatgaaagaagttctcagaagctacactctacctcacagaacatcaacctgggaccgtctggaaatcctcatgccaaaccaactgactttgatttcttaaaagttattggaaaaggcagctttggcaaggttcttcttgcaaaacggaaactggatggaaaattttatgctgtcaaagtgttacagaaaaaaatagttctcaacagaaaagagcaaaaacatattatggctgaacgtaatgtgctcttgaaaaatgtgaaacatccgtttttggttggattgcattattccttccaaacaactgaaaagctttattttgttctggattttgttaatggaggggagctttttttccacttacaaagagaacggtcctttcctgagcacagagctaggttttacgctgctgaaattgctagtgcattgggttacttacattccatcaaaatagtatacagagacttgaaaccagaaaatattcttttggattcagtaggacatgttgtcttaacagattttgggctttgtaaagaaggaattgctatttctgacaccactaccacattttgtgggacaccagagtatcttgcacctgaagtaattagaaaacagccctatgacaatactgtagattggtggtgccttggggctgttctgtatgaaatgctgtatggattgcctcctttttattgccgagatgttgctgaaatgtatgacaatatccttcacaaacccctaagtttgaggccaggagtgagtcttacagcctggtccattctggaagaactcctagaaaaagacaggcaaaatcgacttggtgccaaggaagactttcttgaaattcagaatcatcctttttttgaatcactcagctgggctgaccttgtacaaaagaagattccaccaccatttaatcctaatgtggctggaccagatgatatcagaaactttgacacagcatttacagaagaaacagttccatattctgtgtgtgtatcttctgactattctatagtgaatgccagtgtattggaggcagatgatgcattcgttggtttctcttatgcacctccttcagaagacttatttttgtgagcagtttgccattcagaaaccattgagcaaaataagtctatagatgggactgaaacttctatttgtgtgaatatattcaaatatgtataactagtgcctcatttttatatgtaatgatgaaaactatgaaaaaatgtattttcttctatgtgcaagaaaaatagggcatttcaaagagctgttttgattaaaatttatattcttgtttaataagcttatttttaaacaatttaaaagctattattcttagcattaacctatttttaaagaaaccttttttgctattgactgtttttttccctctaagtttacactaacatctacccaagatagactgttttttaacagtcaatttcagttcagctaacatatattaatacctttgtaactctttgctatggcttttgttatcacaccaaaactatgcaattggtacatggttgtttaagaagaaaccgtatttttccatgataaatcactgtttgaaatatttggttcatggtatgatcgaaatgtaaaagcataattaacacattggctgctagttaacaattggaataactttattctgcagatcatttaagaagtaacaggccgggcgcggtggctcacgcctgtaatcccagcactttgggaggctgaggcgggcagatcacctgaggtcaggagttggagaccagcctgaccaacatggacaaaccccgtctctactaaaaatacaaaattggcagggtgtggtggcacatgcctataatcccagctacttgggaggctaaggcaggagaatcgcttgaacccgggaggcggaggttgcagtgagccgagatcgcaccattgcactcctgcctgggcaacaagagtgaaactccatc

SEQ ID NO: 303 - DNA, 463 bp, Homo sapiens
  SITE (421): n equals a,t,g, or c
ggcagagctcatagcttgttggttacctccatggggcacataaagctgacagattttggattatctaaggtgggactaatgagcatgactaccaacctttacgagggtcatattgagaaggatgctagagagttcctggataaacaggtctgtggcacacctgaatacattgcaccagaagtgattctgaggcagggttayggaaagccggtggactggtgggccrtggggattatcctctatgaatttctggttggatgcgtgccattctttggggatactccagagggctatttggacaagtcatcartgatgagatcaactggcctgagaaggatgaggcaccccacctgatgccaggatctgattaccttactcctcaggcagaatccctggagagctgggacaggtggtgcatatnaagyaaacagcatcgattttccgtctttagctggacagtttc

SEQ ID NO: 304 - DNA, 941 bp, Homo sapiens
  SITE (870): n equals a,t,g, or c
  SITE (920): n equals a,t,g, or c
  SITE (925): n equals a,t,g, or c
tgtggtatacctgtgtgacaactggggaggacacttcccttgtgccctcaaatcagttgtccctccagatgagaagcactggaatgatctggctttggaatttcactatatgaggtctctgccgaagcatgagcgattggtggatctccatggttcagtcattgactacaactatggtggtggctccagcattgctgtgctcctcattatggagcggctacaccgggatctctacacagggctgaaggctgggctgaccctggagacacgtttgcagatagcactagatgtggtggagggaatccgcttcctgcacagccagggacttgtccatcgtgatatcaaactgaaaaatgtgctgctggataagcagaaccgtgccaagatcactgacttaggattctgcaagccagaggccatgatgtcaggcagcattgtggggacaccaatccatatggcccctgaacttttcacaggggctcgcccagaacgtcttcctgtgtttgatgaggagtgctggcagttgatggaagcctgttgggatggcgaccccttgaagaggcctctcttgggcattgtccagcccatgctccagggcatcatgaatcggctctgcaagtccaattctgagcagccaaacagaggactagatgattctacttgaaagcaaagacctttctctttcactctctagttatttccttccccctcaccttttggccatggggagaatttgacatttattcactataggacacactcccaagggaactggtgcttgctgggaaacttggaaccttccagcagggatgacttctggacagtgaagagttgaatgactgagcatattcagcagcttactgaacgccnagctatccctttagcaaaaaagtgtcttaagagtgtaaaacttgaggaanggggnggtctggctttacaaa

SEQ ID NO: 305 - DNA, 703 bp, Homo sapiens
  SITE (692): n equals a,t,g, or c
  SITE (702): n equals a,t,g, or c
ggaaacccactagtcccagctcctggggtggcacagacattgcaactggccctgcctgtgggtcctaggggcccttggctaccaggaggctaagaacactgctcatgaatgacagtgagccctgaaagctctgggggtgtcacccagtcccacaagcctgcatcccctgcagtggagatgggctcagctcctggacgtgccacagacagaaagcataacatacactcgccaggaagagcctttgcctgactcagggcagctcagagtgtggggcagaaggtgaccagccagctcagggcaggagatgcagagcacagccaattacctgtggcacacagatgacctgctggggcagggggccactgccagtgtgtacaaggcccgcaacaagaaatccggagagctggttgctgtgaaggtcttcaacactaccagctacctgcggccccgcgaggtgcaggtgagggagtttgaggtcctgcggaagctgaaccaccagaacatcgtcaagctctttgcggtggaggagacgggcggaagccggcagaaggtactggtgatggagtactgctccagtgggagcctgctgagtgtgctggagagccctgagaatgcctttgggctgcctgaggatgagttcctggtggtgctgcgcttgtggtggccgcatgaaccacytgcgggagaacggnattgtgcatng

SEQ ID NO: 306 - DNA, 1393 bp, Homo sapiens
  SITE (1035): n equals a,t,g, or c
  SITE (1389): n equals a,t,g, or c
caaccccagcagcatggctgtatcctttacctcggggtcttgccagaagcagcctcaagatgcatctcctccgccaaaagaatgtgaccaaggaactctcagtgcatccctaaatccgagtaattcagagagtagtccttccagatgcccttcagacccagactctacctcccagccaaggtcaggggcctctgcagatgtagctagagaygtmaagcaacccactgccacgccgaggagctaccggaacttcaggcatccagaaatagttggctactccgtaccaggacgaaatgggcaaagtcaagacctcgtcaaaggatgtgcaagaacagcccaggctccggaagacagaagtacagagccagatggcagtgaggcagaaggcaaccaggtctattttgctgtctacaccttcaaggcacgaaacccaaatgagctgagcgtgtcagccaatcagaaactcaagatcctcgagtttaaagatgttacaggaaatacagagtggtggttagctgaggttaacgggaagaagggctacgttccctccaattatatccgcaaaaccgagtacacctgagcccacgttgcctgccacccagccttgctgcctttgctttcagtccgccgagggttctggcggcccaccgagagggcgcctgctcctgagacacaggccctgtctgcgttgcttaaccatggcatggtggagcacaccacagatcttgttctcctcgattgggttgtaaaccttgatgctcactagaatctctagaatttgaaatggaccctggggctttgcaaatgacttagtgactatgagaagagagacaagtcttggagctggcttttggaaaggagaaacttgcagtcagaagcccagtgtcctatgtatgcaggaagctgtgctctagcaatagacagtgttggtaatggttgtgctgtacggcgtttggggtggccccatgttccatgctcagctgaccggatgccaactcagatgaaaagaattcatggctctgggcaccccgtgangcagtgcttgcacatggctgggagtttgtcgggattgaaccaaacctagtgcttcaaagctcctgggacacctccagtgtccagcacacattctcatacatactgcccctaatttctaaagtccctaaagcactacattctgtaaccttgtttcttttactccattcccagattagttatgcaaaattcaactgcgttctacttttagaagtgtttagggtctttattttctgttgacccttcatctgaaagattctcttcccttgttaggtacaatcamtggccccccccttttttttgagaggggtctgctawgttgccaggckggtctaaagcckgggytcaagcaacctnccgg

SEQ ID NO: 307 - DNA, 1639 bp, Homo sapiens
tcgacccacgcgtccggtaccccgccggggcgaccgcccggcgcctggcccggggctgctggtccgccctctgggactacgagacgcccaaggtgatcgtggtgaggaaccggcgcctgggggtcctgtaccgcgccgtgcagctgctcatcctgctctacttcgtgtggtacgtattcatcgtgcagaaaagctaccaggagagtgagacgggccccgagagctccatcatcaccaaggtcaaggggatcaccacgtccgagcacaaagtgtgggacgtggaggagtacgtgaagccccccgaggggggcagcgtgttcagcatcatcaccagggtcgaggccacccactcccagacccagggaacctgccccgagagcataagggtccacaacgccacctgcctctccgacgccgactgcgtggctggggagctggacatgctgggaaacggcctgaggactgggcgctgtgtgccctattaccaggggccctccaagacctgcgaggtgttcggctggtgcccggtggaagatggggcctctgtcagccaatttctgggtacgatggccccaaatttcaccatcctcatcaagaacagcatccactaccccaaattccacttctccaagggcaacatcgccgaccgcacagacgggtacctgaagcgctgcacgttccacgaggcctccgacctctactgccccatcttcaagctgggctttatcgtggagaaggctggggagagcttcacagagctcgcacacaagggtggtgtcatcggggtcattatcaactgggactgtgacctggacctgcctgcatcggagtgcaaccccaagtactccttccggaggcttgaccccaagcacgtgcctgcctcgtcaggctacaacttcaggtttgccaaatactacaagatcaatggcaccaccacccgcacgctcatcaaggcctacgggatccgcattgacgtcattgtgcatggacaggccgggaagttcagcctgattcccaccattattaatctggccacagctctgacttccgtcggggtgggctccttcctgtgcgactggatcttgctaacattcatgaacaaaaacaaggtctacagccataagaaatttgacaagatggtggacactcctgcctccgagcctgcccaagcctccacacccacagaccccaaaggtttggctcaactctgagctcctttccatctcactggactgcagacccggcctggtggggccagagagtccccagctagggacctgcacgtggacgtgggcacctcagtagcggagcatctccacgaaacggggcaccacaggatccctgtgcaagggctgggggcacgctctggccccaggcttgtgccccaccctggcatacagcccctgacacctcctccccagctggtccctacagggctgctcacttcccatcacctctcacagccacctggaacccaagccagctgagctctgaggggctctgctcccggtcttgggccctgggaaccccaccccaccccaccccacaggcgttgtaaccttgaatctgcccagactcttcccttagaagtcacaacatactcagtccaataaacctgtgagcagaaaaaaaaaaaaaa

SEQ ID NO: 308 - DNA, 877 bp, Homo sapiens
  SITE (739): n equals a,t,g, or c
  SITE (778): n equals a,t,g, or c
  SITE (822): n equals a,t,g, or c
  SITE (872): n equals a,t,g, or c
gaaaagattcttaggaacgccgtaccagccgcgtctctcmggacagcaggcccctgtccttctgtcgggcgccgctcagccgtgccctccgcccctcaggttctttttctaattccaaataaacttgcaagaggactatgaaagattatgatgaacttctcaaatattatgaattacatgaaactattgggacaggtggctttgcaaaggtcaaacttgcctgccatatccttactggagagatggtagctataaaaatcatggataaaaacacactagggagtgatttgccccggatcaaaacggagattgaggccttgaagaacctgagacatcagcatatatgtcaactctaccatgtgctagagacagccaacaaaatattcatggttcttgagtactgccctggaggagagctgtttgactatataatttcccaggatcgcctgtcagaagaggagacccgggttgtcttccgtcagatagtatctgctgttgcttatgtgcacagccagggctatgctcacagggacctcaagccagaaaatttgctgtttgatgaatatcataaattaaagctgattgactttggtctctgtgcaaaacccaagggtaacaaggattaccatctacagacatgctgtgggagtctggcttatgcagcacctgagttaatacaaggcaaatcatatcttggatcagaggcagatgtttggagcatgggcatactgttatatgntcttatgtgtggatttctaccatttgatgatgataatgnaatggctttatacaagaagattatgagaggaaaatatgatggtnccaagtggctctctccagtagcattctgcttcttcaacaaatgctgcagnggacc

SEQ ID NO: 309 - DNA, 1558 bp, Homo sapiens
ccacgcgtccgagaaatcatcaggaatgtgaaaaagctacaggaggaagggtggctggaaggagaactaaatgggagaagaggaatgttccctgacaatttcgttaaggaaattaaaagagagacggaattcaaggatgacagtttgcccatcaaacgggaaaggcatgggaatgtagcaagtcttgtacaacgaataagcacctatggacttccagctggaggaattcagccacatccacaaaccaaaaacattaagaagaagaccaagaagcgtcagtgtaaagttctttttgagtacattccacaaaatgaggatgaactggagctgaaagtgggagatattattgatattaatgaagaggtagaagaaggctggtggagtggaaccctgaataacaagttgggactgtttccctcaaattttgtgaaagaattagaggtaacagatgatggtgaaactcatgaagcccaggacgattcagaaactgttttggctgggcctacttcacctataccttctctgggaaatgtgagtgaaactgcatctggatcagttacacagccaaagaaaattcgaggaattggatttggagacatttttaaagaaggctctgtgaaacttcggacaagaacatccagtagtgaaacagaagagaaaaaaccagaaaagcccttaatcctacagtcactgggacccaaaactcagagtgtggagataacaaaaacagataccgaaggtaaaattaaagctaaagaatattgtagaacattatttgcctatgaaggtactaatgaagatgaacttacttttaaagagggggagataatccatttgataagtaaggagactggagaagctggctggtggaggggcgaacttaatggtaaagaaggagtatttccagacaattttgctgtccagataaatgaacttgataaagactttccaaaaccaaagaaaccaccacctcctgctaaggctccagctccaaagcctgaactgatagctgcagagaagaaatatttttctttaaagcctgaagaaaaggatgaaaaatcaacactggaacagaaaccttctaaaccagcagctccacaagtcccacccaagaaacctactccacctaccaaagccagtaatttattgagatcttctggaacagtgtacccaaagcgacctgaaaaaccagttcctccaccacctcctatagccaagattaatggggaagtttctagcatttcatcaaaatttgaaactgagccagtatcaaaactaaagctagattctgaacagctgccccttagaccaaaatcagtagactttgattcacttacagtaaggacctccaaagaaacagatgttgtaaattttgatgacatagcttcctcagaaaacttgcttcatctcactgcaaatagaccaaagatgcctggaagaaggttgccgggccgtttcaatggtggacattctccaactcacagccccgaaaaaatcttgaagttaccaaaagaagaagacagtgccaacctgaagccatctgaaaaaaaaaaaaaaa

SEQ ID NO: 310 - DNA, 1289 bp, Homo sapiens
gcggccgccctttttttttttttttttttttttttttttaactgttctctagaaatatatttattcatgcaaacatgtctaagtcactctacgtatttttatacaacataagattgtttatgatcttatgaccatttttgtttatttttaatttttttgccagagagggctttcagtaaatgttttatttagaacattctttgaaaaatttgaagtgcaaagccacaaaaagcaatggatttaaatatataatgcgtagtagagttaggattatcacactagctctttttaaatctcactgctgttagtagtttcttttaattcttccatcactaattcctgttggggtttttcagcacttttcctataaagcaaggtttccccatgagggttttgaaatgtagattcctggacaagctgattagatgtgtttatgagcacatggcttttagcttttagggcataagcttccataggctttgctcttttttggcagagctggagctggaaagcttcttggaaaccacggcggaaattctcgttgaagaaaccataaatgatgggattgacactgctgttgccgaatgccagccagtgtgcaaaagggtagatgtagatgttgatgatctgcagttcatttggagaaaggtcagcgtagtctgagagcatcattagagtccacaggggcagccatgagagaataaaaagcagggccacaatcaggagcatcttaatgatcttctgcttcttcctggacaccacgtgccactgctcctggttcttcctgcctgtgtgaggaactgcagccctgaagagtgaaattccaatccttccatacatgatgacaatgagggagaggggagccaggtagatgttggcaaacagcacagtggtgtagatcttcctcatttcctgatttggccagtcttcccggcaccagtagactggactggttttattctgggagttgagtctcactcggtaatatttttcttcttgcacatgtaacattactgcagatggagacataatggtgatggctaggacccagatgatcataataatgacaaacgctgtcttgatagtgagctttggtttaaaagggtagaccacacactggaacctatctacagcaattgcaactaacgtaaagactgaagctgcgacagatattccctggaccaatccactgatcttgcacatcgtgtttccaaatggccatcctgctataatattgtccagcagtgttataggcatgcagaatatgccaactagtaaatcacttatgc

SEQ ID NO: 311 - DNA, 1500 bp, Homo sapiens
ggcacgaggccgccgccgggactagaagtgagccgcccgggtcccaaacgccagccagccagtcagtgggtcccgcagtcgcccgcaaccggggcgaatcatggcggccgccaaggtggctttaaccaagagagcagatccagctgagcttagaacaatatttttgaagtatgcaagcattgagaaaaacggtgaatttttcatgtcccccaatgactttgtcactcgatacttgaacatttttggagaaagccagcctaatccaaagactgtggaacttttaagtggagtggtggatcagaccaaagatggattaatatcttttcaagaatttgttgcctttgaatctgtcctgtgtgcccctgatgctttgtttatggtagcctttcagctgtttgacaaagctggcaaaggagaagtaacttttgaggatgttaagcaagtttttggacagaccacaattcatcaacatattccatttaactgggattcagaatttgtgcaactacattttgggaaaagaaagaaaaagacacctgacatatgcggaatttactcagtttttattggaaatacaactggagcacgcaaagcaagcctttgtgcaacgggacaatgctaggactgggagagtcacagccatcgacttccgagacatcatggtcaccatccgcccccatgtcttgactccttttgtagaagaatgtctagtagctgctgctggaggtaccacatcccatcaagttagtttctcctattttaatggatttaattcgctccttaacaacatggaactcattagaaagatctatagcactctggctggcaccaggaaagatgttgaagtgactaaggaggagtttgttctggcagctcagaaatttggtcaggttacacccatggaagttgacatcttgtttcagttagcagatttatatgagccaaggggacgtatgaccttagcagacattgaacggattgctcctctggaagagggaactctgccctttaacttggctgaggcccagaggcagaaggcctcaggtgattcagctcgaccagttcttctacaagttgcagagtcggcctacaggtttggtctgggttctgttgctggagctgttggagccactgctgtgtatcctatcgatcttgtaaaaactcgaatgcagaaccaacgatcaactggctcttttgtgggagaactcatgtataaaaacagctttgactgttttaagaaagtgtacgctatgaaggcttctttggactgtatagaggtctgttgccacagttattgggagttgccccagagaaggccataatacttacagtgaacgattttgtgagggataaatttatgcacaaagatggttcggtcccacttgcagcagaaattcttgctggaggtgcgctggaggctcccaggtgattttcacaaatcctttagaaatcgtcaagatccgtttgcaagtggcaggagaaatcaccactggtcctcga

SEQ ID NO: 312 - DNA, 1887 bp, Homo sapiens
  SITE (673): n equals a,t,g, or c
gaaaaagggtaacaacccggaaagtagactcaccgtcttggtctagagactgacccctgcacagacagaccccttcccctctctgcgaaaggaccaagccccagaagtcactccatctcctacggctcgcaatttccagaggccccctggcaccttccagcctgatgtcgtgcgtcaagttatggcccagcggtgcccccgcccccttggtgtccatcgaggaactggagaaccaggagctcgtcggcaaaggcgggttcggcacagtgttccgggcgcaacataggaagtggggctacgatgtggcggtcaagatcgtaaactcgaaggcgatatccagggaggtcaaggccatggcaagtctggataacgaattcgtgctgcgcctagaaggggttatcgagaaggtgaactgggaccaagatcccaagccggctctggtgactaaattcatggagaacggctccttgtcggggctgctgcagtcccagtgccctcggccctggccgctcctttgccgcctgctgaaagaagtggtgcttgggatgttttacctgcacgaccagaacccggtgctcctgcaccgggacctcaagccatccaacgtcctgctggacccagagctgcacgtcaagctggcagattttggcctgtccacatttcagggaggctnacagtcagggacagggtccggggagccagggggcaccctgggctacttggccccagaactgtttgttaacgtaaaccggaaggcctccacagccagtgacgtctacagcttcgggatcctaatgtgggcagtgcttgctggaagagaagttgagttgccaaccgaaccatcactcgtgtacgaagcagtgtgcaacaggcagaaccggccttcattggctgagctgccccaagccgggcctgagactcccggcttagaaggactgaaggagctaatgcagctctgctggagcagtgagcccaaggacagaccctycttcmaggaatgcctaccaaaaactgatgaagtcttccagatggtggagaacaatatgaatgctgctgtctccacggtaaaggatttcctgtctcagctcaggagcagcaataggagattttctatcccagagtcaggccaaggagggacagaaatggatggctttaggagaaccatagaaaaccagcactctcgtaatgatgtcatggtttctgagtggctaaacaaactgaatctagaggagcctcccagctctgttcctaaaaaatgcccgagccttaccaagaggagcagggcacaagaggagcaggttccacaagcctggacagcaggcacatcttcagattcgatggcccaacctccccagactccagagacctcaactttcagaaaccagatgcccagccctacctcaactggaacaccaagtcctggaccccgagggaatcagggggctgagagacaaggcatgaactggtcctgcaggaccccggagccaaatccagtaacagggcgaccgctcgttaacatatacaactgctctggggtgcaagttggagacaacaactacttgactatgcaacagacaactgccttgcccacatggggcttggcaccttcgggcaaggggaggggcttgcagcaccccccaccagtaggttcgcaagaaggccctaaagatcctgaagcctggagcaggccacagggttggtataatcatagcgggaaataaagcaccttccaagcttgcctccaagagttacgagttaaggaagagtgccaccccttgaggcccctgacttccttctagggcagtctggcctgcccacaaactgactttgtgacctgtcccccaggagtcaataaacatgatggaatgctaaaaaaaaaaaaaaaaa

SEQ ID NO: 313 - DNA, 783 bp, Homo sapiens
  SITE (19): n equals a,t,g, or c
  SITE (76): n equals a,t,g, or c
  SITE (77): n equals a,t,g, or c
tcttccctctttatttggnacaacagccggagctccaccgcggtggcggccgctctagaactagtggatcccccgnnctgcaggaattcggcacgagcttctcactgcggaccctggattgaaacgatctccccgcggccgccgccgctacctggtgcccgcaggtgcctgcaggagtcctggggccagctggcctcgatgtacgtcagcacgcgggaacggtacaagtggctgcgcttcagcgaggactgtctgtacctgaacgtgtacgcgccggcgcgcgcgcccggggatccccagctgccagtgatggtctggttcccgggaggcgccttcatcgtgggcgctgcttcttcgtacgagggctctgacttggccgcccgcgagaaagtggtgctggtgtttctgcagcacaggctcggcatcttcggcttcctgagcacggacgacagccacgcgcgcgggaactgggggctgctggaccagatggcggctctgcgctgggtgcaggagaacatcgcagccttcgggggagacccaggaaatgtgaccctgttcggccagtcggcgggggccatgagcatctcaggactgatgatgtcacccctagcctcgggtctcttccatcgggccatttccagagtggcaccgcgtattcaacttttatactagtaacccactgaaagggccaagaagttgccactggttgatgaacacacagacacaatctggaactgctgaggcactatcaggacaagtatcgtgggccacaatagatctcac

SEQ ID NO: 314 - DNA, 250 bp, Homo sapiens
ccacgcgtccgtatgacaaacaggtcaactcttgtgcccgattttggttcagtggctgtaatggctcaggaaatagattcaacagtgaaaaggaatgtcaagaaacctgcattcaaggatgagcaagtaaattggcctgtctctatcaaaagcatagaactccctaatttccacatattcacccaatacaaatacagcactatatttgagtgtaaaaaaaaaaaaaaaaaaaaaaaaaaaaaaaaaaaaa

SEQ ID NO: 315 - DNA, 2548 bp, Homo sapiens
cccagacagaagagaccacggtaaagatcagctgacggcctctgtgggaacaaagacagggaaaggggaaatgagttcaccagaaaccaacaggcagcacaggaggtggtaaacccgaaaaagaaaatgaagaaaaagaaatacgtgaattctggcacagtcaccctgctttcctttgctgtggagtcagagtgcaccttccttgactacatcaaaggagggacccagatcaacttcactgtggccattgatttcactgcctccaatgggaacccctcacagtccacatccctgcactacatgagcccctaccagctgaacgcctacgcgctggcgctgactgccgtcggagagatcatccagcactacgacagtgacaagatgttccctgccctgggcttcggggccaagctgcccccggatggcagagtgtcccacgagttcccactgaatggcaaccaggagaacccctcatgctgcggcatcgacggcatcctggaggcctaccaccgcagcctgcgcactgtgcagctgtacggcccaccaactttgcccccgtggtcacccacgtggccaggaatgcagcggccgtgcaggatggctcccagtactcggtgctgctcatcattactgatggggtcatctcggacatggcgcagaccaaggaggccattgtcaacgctgccaagctccccatgtccatcattatcgtcggcgtgggccaggcagagttcgacgccatggtggagctggatggcgacgacgtgcggatctcctcccgggggaagctggctgaacgcgacatcgtccagtttgtacccttccgggactacgtggaccgcacaggcaaccacgtgctgagcatggacccgcctggcccgagacgtgctggcagagatccctgaccaactggtgtcctacatgaaggcacagggcattcgcccgcgtcccccacccgcagcaccaacccactcgccctcgcagtccccagcccgcacgccccctgcgtcccccctgcacacgcacatctgaacctggtctcagcaggcaggtggctggggcctgggagaggccaggtgaatgggaggccagggccccagactccccgaagttggcctgcccggcctttgggacatctgtgtgcctgggaggctgccagggggtggggcttctgaagacccctcctcaatttcttggcctcacttattgcccaaacccagggagttaggggggtacgggtgaaagaggggtacacagggacccagcccttctcttcttccccaatacctggctctaacccagccaggaaggtgtaaacaataagggtgattgrgrkccctgkcscccacccccggcaatcctatttgcttacctgtcaccctgaagcctgggcttggcctcctccagccccccatctccgtcccatcctcccatggtgtctactcctgtccctgagccccgccctgtggtctatcctgtgcccgatttccagtgaaccccatgaagctgatgggtttgcaggaaggcctgaacatgtgcaccctcccagggacactggatgcgctgggagccccggggaccccatggggtgctgtaatcatggaccgtaggccatgtgatgggcctgaagtggaggctgctcagcacagagccctttctggtgcctctcgaactcagtacgatgcaagttctagacacacagatggcctgtggaggcctctccctggtgtgggcccacaggtacttccatggttgactcctggcttcaggaatcccttcctccctccagaggcttcccagggccctcggtgcccacgcctctgcccatctggaggcctgagtaaggagtggctcagccccacgttcccacactgctcctgctctttgccctgtatcccatgaggctaggagacaggagtcctgggtttgagccctgcctccccccactgcctaatgtgggaacccaagcaaggcccttctaccttttgggcctcagtttccatgtctgtacgacaagagggttgaccagatggccccaggttttcctttaggtctgacatcctgagggtcattcatcccatgcccagctccccccatcctactcctaacagatgtgaccctacttgaggccgccttggcttttgggtcaccctgtctcaacccatcaccccaaacataccctagtccttcagcctggggctctggcttctgagcccgagctcctgcccctgctgtgggaaaggtggggaagaaggtgatctccctcccgggcccacccagctgcccagcctttgcccactcggggagcagatcatgcatgccaatccctgttgccgcatggagctcctcagcccactgacctctccgtgcctggtgcaggccaggcccccgtcttccgcctgcctctgcttccccgtcatgcatggtggtggtgtttctacggtgtctggttctgtgcccgtctctgagacagtctctgtgtggaatttgccttaaactgaagtaaatttggttcttttagtaaaaaaaaaaaaaaaaaaaaaaaaaa

SEQ ID NO: 316 - DNA, 638 bp, Homo sapiens
  SITE (625): n equals a,t,g, or c
aattcggcacagtgggcacggactactggttatattccagaggtgtgtgcaggactaaatctacaagtgataatgaaaccagcaggaagaatgaagaagtaatgacccattcggggctgtggaggacctgctgcctagaaggggctttccgaggcgtgtgcaagaaaatcgatcacttccctgaagatgctgactacgaacaggacacagccgaatatctcctgcgagctgtgagggcctccagtgtcttccccatcctcagtgtcacgctgctgttcttcggcgggctctgcgtggcagccagtgagttccaccgcagcagacacaacgtcattctcagcgcgggcatcttttttgtctctgcagggttaagcaacatcattggcatcatagtttatatatcagccaacgccggagaccccggggcagcgtggacttccaaaaaaagttactcctatggttggtccttttattttcgggagccttctctttcatcatcgcaraaattgtaggagtgggttgccgtgcacatctattttgraaaacatcargcagktacrggccaaatcccattcggagtttcctgragraaatctwacttttggcccggcttcccaccttaacngggaattcgaatt

SEQ ID NO: 317 - DNA, 1618 bp, Homo sapiens
ggctagacagactctcttgcttggatggtactccaccactttcttggcacatgagatgcaagattgctcagggtgcagctaatggcatcaattttctacatgaaaatcatcatattcatagagatattaaaagtgcaaatatcttactggatgaagcttttactgctaaaatatctgactttggccttgcacgggcttctgagaagtttgcccagacagtcatgactagcagaattgtgggaacaacagcttatatggcaccagaagctttgcgtggagaaataacacccaaatctgatatttacagctttggtgtggttttactagaaataataactggacttccagctgtggatgaacaccgtgaacctcagttattgctagatattaaagaagaaattgaagatgaagaaaagacaattgaagattatattgataaaaagatgaatgatgctgattccacttcagttgaagctatgtactctgttgctagtcaatgtctgcatgaaaagaaaaataagagaccagacattaagaaggttcaacagctgctgcaagagatgacagcttcttaaaactttattggaaaagactcttgactttttatatacacctatctcaaccatttttttaactgatttttttcctaaatattcttctttacctttaacaaggcataggctgttgcaggacagtggttattaaagcatgggttgaacttccaaaatataaaaatagagccaccatatcaacacttagccctacccattagtatcacccccagttcttacagtaatccctgagaaatctccttcaagcatcaccaaacacagtttgaaaattacagggttagcaaaaagagcctgggctgtatgtagggtggaaacactctgatctgaagcccagctgactccactactaatttgctgtaaagctttggacatacacttagctgctgtgagccactaataacattgggctaatatctgctgtgcttctctgacaggtagtcatgaaaatcaaatgatgcaaaatatatacaagcactttgtaaattgtaaaatgatacaaaatttaaagtttatagagccagttacaaaatcctattagtcatatatttatagattgtgttcacagcaatcatttaaccacaaataaaatatcccttgatgatactgccataatgatatgtccattattagattatgttacatgacaaagttgaaggaatttggcagatgcagttaaggttcctaaacaactcactttgagactgttgaaakggcctgacctaatcaagtgaacccttgcaagaagaattctccttgtaagccttgaagaagtatgtgagagggccacattggctaaaacctaaaggtggcctctaggagatgagacctaccttccagttgtcagcaagcaggaaaaaaaaattgggacctcagttgcaaccacaaggaactgaattctgccaaaaatctgagtcagcttagaagagtactccaagcttcagatgataaccacagcctgggctgacacctggatttcagctttgcatgatcctcagtatgagaatctatctgttctgtgctggacttctaatatatagaactgtgag

SEQ ID NO: 318 - DNA, 2159 bp, Homo sapiens
ggcacgagcgcatcccgcaccaaagtgttccccggggagcgcgtagagcatgtaacttttaacttcacgttggagaatcagatccaccgaggcgggcagtacttcaatgacaagttcattgggctgcggctcaagtcagtgtcctttgaggattccctgtttgaagagtgttattttgaggatgtcacatccagcaacacgtttttccgcaactgcacattcatcaacactgtgttctataacactgacctgttcgagtacaagtttgtgaacagccgtctgataaacagtacattcctgcacaacaaggagggctgcccgctagacgtgacagggacgggcgaaggtgcctacatggtatactttgtgagcttcctggggacactggcagtgcttcctgggaatatcgtgtctgccctgctcatggacaagatcggcaggctcagaatgcttgctggctccagcgtgatgtcctgtgtctcctgcttcttcctgtcttttgggaacagtgagtcggccatgatcgctctgctctgcctttttggcggggtcagcattgcatcctggaatgcgctggacgtgttgactgttgaactctacccctcagacaagaggaccacagcttttggcttcctgaatgccctgtgtaagctggcagctgtgctggggatcagcatcttcacatccttcgtgggaatcaccaaggctgcacccatcctctttgcctcagctgcccttgcccttggcagctctctggccctgaagctgcctgagacccgggggcaggtgctgcagtgaaggggtctctagggctttgggattggcaggcacactgtgagaccaacaactccttccttcccctccctgccctgccatcctgacctccagagccctcactccccactccccgtgtttggtgtcttagctgtgtgtgcgtgtgcgtgtgcatgtgtgtaaaccccgtgggcagggactacagggaaggctccttcatcccagttttgagatgaagctgtactccccatttcccactgcccttgactttgcacaagagaaggctgagccccatccttctccccctgttagagaggggcccttgcttccctgttccaggggttccagaataggcttcctgccttccccatcattccctctgcctaggccctggtgaaaccacaggtatgcaattatgctaggggctggggctctggtgtagaccatggaccaaaagaacttcttggagtctgaagagtgggcctcgggtgccctctcacatctcctgttggatgctgggggagaagcaataaacctcagccctctggcctccactttcctctcaatttgggctgcaaatatgaagcctgaattttatgaaattagctttctgattcttatttattaatagattaagttctgaggcagctccgcaggactgtgtgtgaatgtgtatgtatacttacatatgtgtgtgcatgtgccatggggcggggggtatcactatactgtcctcaaatataagccaagggtaatttcagcggatgcacacacaaccctgcctcccacagttcctcccctaatctggtttctgtgttgagcctgggatggaggagccctaggccagcctgggataagagtcccacagtctagggagatctgagggcatccgacaaggcccatctccttccctcctcaagaagcagaggcctcctctggagtgagaggctccacccactacagcacaggcgggaatagcacagctgccctcccatgctccctacctgtcccctcacagggaggggagcaggggagggaaagaaaccaggcatctggtcaaaccagcagatcaaaaagcacaaagagctggggcagaggcaggaagcaggggccctcctggcagctcctctgagtggggagaggttgggcagtgagtgagggacccctaatgcagggactagaagcctcagtttccccattttacccttccacacaatagcctctgtaggttaggctgccccatcccaccctactctgtgtggctgctttctttggtgccctcccgtcaccccactgtagctgtgacgtgttgtagtttttagatgtttgtaaaatgtttaaaaaaatgttaaaaaaaaaaaaaaaaaaaaaaaaaaaaaaaaaaa

SEQ ID NO: 319 - DNA, 1225 bp, Homo sapiens
gaattcggcacgagcagacactgctccttgggtagccataactgtgtccccactttccagggtgccagacctacatggacatcgtcattgtcctggatggctccaacagcatctacccctgggtggaggttcagcacttcctcatcaacatcctgaaaaagttttacattggcccagggcagatccaggttggagttgtgcagtatggcgaagatgtggtgcatgagtttcacctcaatgactacaggtctgtaaaagatgtggtggaagctgccagccacattgagcagagaggaggaacagagacccggacggcatttggcattgaatttgcacggtaaaaaaaaagtagaacaaaaaaaatttttttagatctcagatgctattgtagttatctattgccttgtaacacactaccacaaaatttagtaccttgagacaataatttcttaattcctcaaaattctggagtttgactgggctcagctggtcggttttctcttgggtcctctcaggtagttgcagtctggtgtcaccttgggctgttgtcatctgaaggttctcacgtggctgtcagttgttgtggctgtggctgagagctcaggtgggactggtgacctgagcacccacacgtagccatgtggcttgattccttggggcatggcaacaggagttttagagacagcgtcccaagagtgagcatcccaagaggcccaggcaggacctgggagactgcctataacctagtctcgaagtcccagaatatgacttctgccacattctattggttgggcaagtgactgagcccaggccagattcaaggggaagggaatttggttctgcccttgatggatgaacagcgaggtcattttgcagaagagcatttagaatggggaatattgttgcagccaactttgaaaaatagcttctgccacagacactctataagaagtaggttctgtgaggatggggtcttcttatggagtgttagtcatcaatggagtggaaagaatgcagtcaaatctgacacctgagactgtatagtagtgaggctgattccttaaaaatcacaccaaaactcggccaggagtggtggctctcacctgtaatcctagcactttcggaggccaaggtgggcagattgcctgagctcaggagttcgagaccagcctgggcaacacggtgaaaccccgtctctactaaaatacaaaaaaaaaaaaaaaaa

SEQ ID NO: 320 - DNA, 2086 bp, Homo sapiens
ctgcaggaattcggcacgagcggagccaagacggtcggggctgcttgctaactccaggaacaggtttaagtttttgaaactgaagtaggtctacacagtaggaactcatgtcatttcttaccaatgatgcgagctcagagtcaatagcatccttctctaaacaggaggtcatgagtagctttctgccagagggagggtgttacgagctgctcactgtgataggcaaaggatttgaggacctgatgactgtgaatctagcaaggtacaaaccaacaggagagtacgtgactgtacggaggattaacctagaagcttgttccaatgagatggtaacattcttgcagggcgagctgcatgtctccaaactcttcaaccatcccaatatcgtgccatatcgagccacttttattgcagacaatgagctgtgggttgtcacatcattcatggcatacggttctgcaaaagatctcatctgtacacacttcatggatggcatgaatgagctggcgattgcttacatcctgcagggggtgctgaaggccctcgactacatccaccacatgggatatgtatacaggagtgtcaaagccagcccatcctgatctctgtggatgggaaggtctacctgtctggtttgcgcagcaacctcagcatgataagccatgggcagcggcagcgagtggtccacgattttcccaagtacagtgtcaaggttctgccgtggctcagccccgaggtcctccagcagaatctccagggttatgatgccaagtctgacatctacagtgtgggaatcacagcctgtgaactggccaacggccatgtcccctttaaggatatgcctgccacccagatgctgctagagaaactgaacggcacagtgccctgcctgttggataccagcaccatccccgctgaggagctgaccatgagcccttcgcgctcagtggccaactctggcctgagtgacagcctgaccaccagcaccccccggccctccaacggtgactcgccctcccacccctaccaccgaaccttctccccccacttccaccactttgtggagcagtgccttcagcgcaacccggatgccaggcccagtgccagcaccctcctgaaccactctttcttcaagcagatcaagcgacgtgcctcagaggctttgcccgaattgcttcgtcctgtcacccccatcaccaattttgagggcagccagtctcaggaccacagtggaatctttggcctggtaacaaacctggaagagctggaggtggacgattgggagttctgagcctctgcaaactgtgcgcattctccagccagggatgcagaggccacccagaggcccttcctgagggccggccacattcccgccctcctgggcagattgggtagaaaggacattcttccaggaaagttgactgctgactgattgggaaagaaaatcctggagagacacttcactgctccaaggcttttgagacacaagggaatctcaacaaccagggatcaggagggtccaaagccgacattcccagtcctgtgagctcaggtgacctcctccgcagaagagagatgctgctctggccctgggagctgaattccaagcccagggtttggctccttaaacccgaggaccgccacctcttcccagtgcttgcgaccagcctcattctatttaactttgctctcagatgcctcagatgctataggtcagtgaaagggcaagtagtaagctgcctgcctcccttccctcagacctctccctcataattccagagaagggcatttctgtctttttaagcacagactaaggctggaacagtccatccttatccctcttctggcttgggccctgacacctaagtctttcccacggtttatgtgtgtgcctcattcctttcccaccaagaatccatcttagcgcctcctgccaactgccctggtgctttctccaagggccatcagtgtcttgcctagcttgagggcttaagtccttatgctgtgttagtttcgttgtcagaacaaattaaaattttcagagccgctaaaaaaaaaaaaaaaaaaaaaaaaaaaaaaaaaaaaa

SEQ ID NO: 321 - DNA, 2292 bp, Homo sapiens
tcgacccacgcgtccgcaataaccaggcctcgactggccacccaggcttccccccaatccagggcctggaggccaccaagcccacccagcagagtctggtgggtgtcctggagactgccatgaagctggccaaccaggatgaaggcccagaggatgaagaggatgaggtgcctaagaagcagaacagccctgtggcccccacagcccagcccaaagccccaccctcaagaactccccagtcgggatcagccccaacagccaaagcgccccccaaagccacatccaccagagcccagcagcagctggccttcctagagggccgcaagaagcagctcctgcaggccgcactgcgagccaagcagaaaaacgacgtggagggtgccaagatgcacctgcgccaagccaagggactggagcctatgctggaggcctcgcgcaatgggctgcctgtggacatcaccaaggtgccgcctgcccctgtcaacaaggacgactttgccctggtccagcggcctggcccgggtctgtctcaggaggccgcccggcgctatggtgaactcaccaagctcatacggcagcagcacgagatgtgcctgaaccactcaaaccaattcacccagctgggcaacatcactgaaaccaccaagtttgaaaagttggcggaggactgtaagcggagcatggacattctgaagcaagccttcgtccggggtctccccacgcccaccgcccgctttgagcaaaggaccttcagcgtcatcaagatcttccctgacctcagcagcaacgacatgctcctcttcatcgtgaagggcatcaacttgcccacacccccaggactgtcccctggcgatctggatgtctttgttcggtttgacttcccctatcccaacgtggaagaagctcagaaagacaagaccagtgtgatcaagaacacagactcccctgagttcaaggagcagttcaaactctgcatcaaccgcagccaccgtggcttccgaagggccatccagaccaagggcatcaagttcgaagtggttcacaagggggggctgttcaagactgaccgggtgctggggacagcccagctgaagctggatgcactggagatagcatgtgaggtccgggagatccttgaggtcctggatggtcgccggcccacaggggggcgactggaggtaatggtccggattcgggagccactgacagcccagcagttggagatgacgacagagaggtggctggtcattgaccctgtgccggcagctgtgcccacacaggttgctgggcccaaagggaaggcccctcctgtgcctgcccctgcaagggagtcagggaacagatcagcccggcccctgcatagcctcagtgtgctggcgtttgaccagagcgtctggagcggaagatcctggccctcaggcaggcgcggcggccggtgcccccagaagtggcccagcagtaccaggacatcatgcaacgcagccagtggcagagggcacagctggagcaggggggtgtgggcatccgacgggaatacgcagcccagctggagcggcagctgcagttctacacggaggctgcccggcgcctgggcaacgatggcagcagggatgctgcaaaggaggcgctctataggcggaatctggtagagagtgagctgcagcggctccgcaggtgaggagcccatggggcgggcagcccccagaaagcgggcagcaggccccgataccgggaagagccgacacagccacgaaccagacaagcagacaatcagcggacaatcggttctggactcacccctcatccgggcccccagccccgccagagcctccgtggctgcgggtgttgggaaccatgcctgccagccagtatgtgcccctcacccaggcctggctgggccctggagagtcctgtttgcacagcccaggggtgtccggcctctggcccgccccggagcagggagggtggctggggccaagccccgagggcccctgcaagcactttacttcctgttcctccccagccttaaccccaaagccctcctgcaccccaaagaagccactgaggctggccgagccacactgtctccccaggggcgtcgacctggcccagctgggtccccagggccagcacatggaataaaatagccagggccacactcaaaaaaaaaaaaaaaaaaaaaaaaaaaaaaaaaaaaaaaaaaaaaaaaaaaaaaaaaaaaaaaaaaaaaaaaaaaaaagggcggccgctctaaagaatccaagcttacgaacccgtgcatgcggaaccaaa

SEQ ID NO: 322 - DNA, 1480 bp, Homo sapiens
ggcacgaggcgtggagagcggagcgaagctggataacaggggaccgatgatgtggcgaccatcagttctgctgcttctgttgctactgaggcacggggcccaggggaagccatccccagacgcaggccctcatggccaggggagggtgcaccaggcggcccccctgagcgacgctccccatgatgacgcccacgggaacttccagtacgaccatgaggctttcctgggacgggaagtggccaaggaattcgaccaactcaccccagaggaaagccaggcccgtctggggcggatcgtggaccgcatggaccgcgcgggggacggcgacggctgggtgtcgctggccgagcttcgcgcgtggatcgcgcacacgcagcagcggcacatacgggactcggtgagcgcggcctgggacacgtacgacacggaccgcgacgggcgtgtgggttgggaggagctgcgcaacgccacctatggccactacgcgcccggtgaagaatttcatgacgtggaggatgcagagacctacaaaaagatgctggctcgggacgagcggcgtttccgggtggccgaccaggatggggactcgatggccactcgagaggagctgacagccttcctgcaccccgaggagttccctcacatgcgggacatcgtgattgctgaaaccctggaggacctggacagaaacaaagatggctatgtccaggtggaggagtacatcgcggatctgtactcagccgagcctggggaggaggagccggcgtgggtgcagacggagaggcagcagttctgggacttccgggatctgaacaaggatgggcacctggacgggagtgaggtgggccactgggtgctgccccctgcccaggaccagcccctggtggaagccaaccacctgctgcacgagagcgacacggacaaggacgggcggctgagcaaagcggaaatcctgggtaattggaacatgtttgtgggcagtcaggccaccaactatggtgaggacctgacccggcaccacgatgagctgtgagccccgcgcacctgccacagcctcagaggcccgcacaatgaccggaggaggggccgctgtggtctggccccctccctgtccaggccccgcaggaggcagatgcagtcccaggcatcctcctgcccctgggctctcagggaccccctgggtcggcttctgtccctgtcacacccccaaccccagggaggggctgtcatagtcccagaggataagcaatacctatttctgactgagtctcccagcccagacccagggaccctggccccaagctcagctctaagaaccgccaccaacccctccagctccaaatctgagcctccaccacatagactgaaactcccctggccccagccctctcctgcctggcctggcctgggacacctcctctctgccaggaggcaataaaagccagcgccgggaaaaaaaaaaaaaaaaaaaaaaaaaaaa

SEQ ID NO: 323 - DNA, 2788 bp, Homo sapiens
ggcacgagcccgacctcaggtgatcctcccgcctcagcctcccaaagtgctgggattataggcatgagccactgcacctggcctttcttttttttgtgtgtgtgtgtgacagagtctggctctgttgcccaggctggagtgcagtggtgcgatctcagctcactgcaacctctgcctcctgggttcaagcgattctcctgcttcagccttccaagtagctgtgactacaggtgcctgccaccacacccggctaatttttttgtatttttggtagagacaggtttcaccgtgttagccagggtggtctcgatctcttgacctcgtgatccgcccatctcggcctcccaaagtgctaggattacaggcgtgagccaccatgcctggctgagtaattttttttaaagcaaattgctagataagtttcttactaattaatgacgaaacatttcccttctgtgcttgaagactgactgtgagcctcgtcagcctgacatgagtgaagccttgggatcctaggatggagacgtggggttggggcggctcaggtgcgtgggctgagcgctggcatcgtgctgctgatttcctgacttcgcccagctccttgcactttgttctttctgcacagaatcagcttaaaatggctcgtttcaccattgtggatgggaagatggggaaaggagtcagcttcaaagacgtggcaggaatgcacgaagccaaactggaagtccgcgagtttgtggattatctgaaggtgaaagcagcgtgggccgggagggaggtgtgagcagaggccggccgtcctcctctcccagaagggctcctgcgggacctggaattccatcgatgacgtgtcgtgggttggcggtgacctctaccatgtcccatggggacaccaagcaggtgctggtgcctgttcaaccagcagcacaagcctcgtgcacatggttcagccaagcagaggctgccaagacccatgcctactgtgccgttagccgtcctgggcccttcatcccttgcaaagctctgtgctttttccagaaccacataaacaccttagccagttggtggcagtgcatgagctgcctatcacgtgcgtcacttacacgtttcctccgcgggcctggtacggtgggtcgcacctgtagtcctggcacctcgaggggctgacatgtgttccctctgcaggcctggtacagtgggtcacgcctgtggtcctggcacctcggggcgctgaggcaggggagtgactgagcccaggagtaggagatcagcctgggcaacagtgagaccctgtctctgcaaaacatttttttatttaattaattttttttttcgagacagagtctcactttgtcactcaggctggagtgcagtggcacaatctcggctcactacaacctccacctccccagttcaagtgattctcctgcctcagcctcccgactagcagggatcacaggcgcccaccaccatgcacggctaatttttgtatttttagtagagacggggtttttccatgttggccaggctggtctcaaactcctgatctcaagctacgcgcctgcctcagcctcccaaaatgttggaattccaggtgtgagccaccgcacctggcctgcaagaagtttttaaaagtagctgggcgtggtgccacatgcctgtatattcccagctactcgagaggctgaggtgagagggtggcttgaacccaggagtttgaggctgcagtgagctatcatggcacccactgcactccagcctgcgtgacccagagagaccttacctctaaaaaacaaaaaaacggaatccccaagtagttagtgttgcattgtctgctgccgtccagagcccagaacgcttcctccagcttggcgccaaggtcccaaagggcgcactgctgctcggcccccccggctgtgggaagacgctgctggccaaggcggtggccacggaggctcaggtgcccttcctggcgatggccggcccagagttcgtggaggtcattggaggcctcggcgctgcccgtgtgcggagcctctttaaggaagcccgagcccgggccccctgcatcgtctacatcgatgagatcgacgcggtgggcaagaagcgctccaccaccatgtccggcttctccaacacggaggaggagcagacgctcaaccagcttctggtagaaatggatggaatgggtaccacagaccatgtcatcgtcctggcgtccacgaaccgagctgacattttggacggtgctctgatgaggccaggccgactggaccggcacgtcttcattgatctccccacgctgcaggagaggcgggagatttttgagcagcacctgaagagcctgaagctgacccagtccagcgccttttactcccagcgtctggcagagctgacaccaggattcagtggggctgacatcgccaacatctgcaatgaggctgcgctgcacgcggcgcgggagggacacacttccgtgcacactctcaacttcgagtacgccgtggagcgcgtcctcgcaggtacagggggcgcgccctgggtgaaggccctccttagcagggcttgaaccccagaaatacccaggcaggtattgagaggtgaggtggatggaaccatcacacaggaaggaacacacgttgcgtttcagttctgcgtaactcatgtctttatgataccttgtacttttccttagtttaaaatatcacagatttacctaagagtagacgctcgtccaacagaaataaaaaatgccttgccaaagaaagtgaaaaaaaaaaaaaaaaaa

SEQ ID NO: 324 - DNA, 2803 bp, Homo sapiens
gcggccgccaatttttttttttttttttttttttgctttctcaaagacagacacagtttatttataaaccaaagaggccaggagcctactagccacccccatccccttccctcttcctgagcacagacatggctcccccacctcctcacaaggtttttggtacaaactgtggtttggcctaragcatccctaaggaccctggtggggcagggtaccctctgctcccaccacctgggatgtgctggggaacgtggagtggggcagcctgatattgatatcccgcggccccggccagggctctggagctgctcttccctgggctctgcagcttggggtcctgggccacctcagacgcaggcccgaggttgggctggggaggagggggtcacccgtccacatcccagctgaagaggtggtgcttcaccagcatgtcccggacgccctccttcaggggctgctgcgcctctctcttcgcagggagctcccagtcctgggagaggctgaaggcaaagcagcagaggactcggagctcacacttgatctggacccagcccgggctgcgcaggaaggaccagggctggtaccacttctccacggtgggcaggctggagcagagcacctccagccacaggtgcagcacctgctcattgagccccacgcagatcagtgagcggagcttcacatccatttgtgcatgcactgcatcgtgggtcacgttcacagactgcacagcccggtagagcagctcctccggggtcaggactttgccatcttcatccaacctgaaggtcttacagagcaccagacgggaatacacggaggcaaagtctctctcgacctcccggcctgcagcctcctcgataamcagccaggggtggcaggcgcccccaagcagggatggcttcttcagtccatgttcgaacagggccttaagggccgggcagagggtccctcgcacgaggtctgtgaccccctccgtcaccgagtcatcccccgcgatggagtactctttgctgcgctcatccaggacttccacgaacttggctggaaaccagcctcgcaggccgttgagctcccccacccagcagtgctcgtccttctgagacacgattgtgatgatgtcgttcttgcggaagcccagctcgtcgtcgtcgtgccgctcaaagtccagcagggccttggctcggcgccggtggctgcgtgagcacgccacgtagttctcgtggtcccgctggtggctctccatgctatagtctggagtcagctccacgctgcagtttttggggtctgtgcactggaagtggcgtgccacgcgcaggatggcttcccggaggtcagccaccagttccgtctgcttgatgttcttggccttgagtgcctccaggtcatcctccccgaagagcagagcagtgatggtggacttcctccgctgggtcctgcggcgaacaacctgagagaggttggtgagggtgccggcccccaggagctggccctggtctgcaatgagataggccaggtgcttgcggcgctgagtctccacggccacatcggtgagggagccggccagccgcatggccacccccagaagcagctccgcgtcctccatctgcgacgggatatccgatagcgtgttgaagatggaggccgagttctctgactggatcagctcttcctccttgaggtgcagcatgcccagcgtgagctggaacagcacccgggagccctcgtagaaaaacaggtcccagatgcgcaggagcagcttgatgtccaccacgctggcgaaggccgtgaggaaccagtgcagtgtgatcagggacagctcaatgtcatgctcctggagcagcttgtccaggcgaggcaggtactggacaatgaggtggcgcaggacccgctggtcagtctggacacccagcagggtggtgctgaagtaggaggcggggagcaggtcctcgatgatggcagacatcatccagaaggcgtcctcctcctccaggaacagcaggaggcaggcggccaccatgccggtgccctggcagtagccgatctctgggtagagccaggccagggcccggagcaccctgcgcaggcggggcaccccgatgctacccatgctggcgaagcaggcgttgctgggcatggtgcggagcaggtccttctcgatctgcttggcagcgatggtctcatcgttggagctgttcttcacaatctcgcggtaggacagctcagagttcctcttcttctgcagggccccagagagccgcatccacagctgtggcctcatgccatgtgggatgccggccagcaccagggagcggagcttctcagagcggggtagggagacggcaatcttgtcccaggtgagatcccccacatcgtggttatgggtgaactccaggtgggcctgccaccgcagcctctgtggagcatcctccatcagaggggagttcgccagcagactggagccaggctcatcaccttcttccttgtacacacggaaaccaaactcatcgtagtagaactctggttgctctgctgactcttccttctgcgtgtacttggccaagatctcctggggccatatgctcggagtcagggctgagaaagggccacaggcaggtgtatggcttcctgacattgtgctggtgggctggcaagtcttctgcagctccaatcttagaagtctcctatcctgctatcttagagctggaaggctcctcaggcttcatctggtccagaatcatctgccctgccccacgggccacctcagcgccaatccgggtcgggttagcagcttccccrctcc

SEQ ID NO: 325 - DNA, 1335 bp, Homo sapiens
  SITE (374): n equals a,t,g, or c
gcggacgcgtgggcttgggtgaccctggccgccaccaagctgttctcctctatacacctgcctggcttgaggtccctgaagcagctgagccggcttcccactgcctcagcctgcctgcaggctgtgtctgctctgtcctcggccctcgtggttgctccttacagggcctgtttttcccacaggctggtttccagccaagttcgtggaagtcctggatgagcgcagcaaagagtactccatcgcgggggatgactcggtgacggagggggtcacagacctcgtgcgagggaccctctgcccggcccttaaggccctgttcgaacatggactgaagaagccatccctgcttgggggcgcctgccacccctggctgnttatcgaggaggctgcaggccgggaggtcgagagagactttgcctccgtgtattcccgtctggtgctctgtaagaccttcaggttggatgaagatggcaaagtcctgaccccggaggagctgctctaccgggctgtgcagtctgtgaacgtgacccacgatgcagtgcatgcacaaatggatgtgaagctycgstcactgatctgcgtggggctcaatgagcaggtgctgcacctgtggctggaggtgctctgctccagcctgcccaccgtggagaagtggtaccagccctggtccttcctgcgcagcccgggctgggtccagatcaagtgtgagctccgagtcctctgctgctttgccttcagcctctcccaggactgggagctccctgcgaagagagaggtgggtggtgtgggcctcgtagggcctgcactgatggagctgcccaaaccgttcgcggggtggctaaggtgggaaccgaagtgctggtgtcagcggttaggaactaccccagccatgcccaaggcctgtgaggtgaggggctgccctgtttgcaggcgcagcagcccctgamggagggcgtccgggacatgctggtgaagcaccacctcttcagctgggatgtggacgggtgaccccctcctccccagcccaacctcgggcctgcgtctgaggtggsccaggaccccaagctgcagagccmagggaagagcagctccagagccctggccggggccgcgggatatcaatatcaggctgccccamtccacgttycccagcacatcccaggtggtgggagcagagggtaccctgccccaccagggtccttagggatgctctaggccaaaccacagtttgtaccaaaaaccttgtgaggaggtgggggagccatgtctgtgctcaggaagagggaaggggattggggtggctagtaggctcctggcctctgttggtttataaat

SEQ ID NO: 326 - DNA, 1903 bp, Homo sapiens
cattagacagcacactgctgactgttttcagttgtttctgtaacagcagaaagtgcactcactaggagtagtcagaattcaaaatgctcaagagaaagccatccaatgtttcagagaaggagaaacatcaaaaaccaaagcgaagcagcagttttgggaatttcgatcgttttcggaataattctttatcaaaaccagatgattcaactgaggcacatgaaggagatcccacaaatggaagtggagaacaaagtaaaacttcaaataatggaggcggtttgggtaaaaaaatgagagctatttcatggacaatgaagaaaaaagtgggtaaaaagtacatcaaagccctttctgaggaaaaggatgaggaagatggagagaatgcccacccatatagaaacagtgaccctgtgattgggacccacacagagaaggtgtccctcaaagccagtgactccatggatagtctctacagtggacagagctcatcaagtggcataacaagctgttcagatggtacaagtaaccgggacagctttcgactggatgacgatggcccctattcaggaccattctgtggccgtgccagagtgcatacggatttcacgccaagtccctatgacactgactccctcaaaatcaagaaaggagacatcatagacattatttgcaaaacaccaatggggatgtggacaggaatgttgaacaataaagtgggaaacttcaaattcatttatgtggatgtcatctcagaagaggaagcagcccccaagaaaataaaggcaaaccgaaggagtaacagcaaaaaatccaagactctgcaggagttcctagagaggattcatctgcaggaatacacctcaacacttttgctcaatggttatgagactctagaagatttaaaagatataaaagagagtcacctcattgaattaaatattgaaaacccagatgacagaagaaggttactatcagctgctgaaaacttccttgaagaagaaattattcaagagcaagaaaatgaacctgagcccctatccttgagctcagacatctccttaaataagtcacagttagatgactgcccaagggactctggttgctatatctcatcaggaaattcagataatggcaaagaggatctggagtctgaaaatctgtctgacatggtacataagattattatcacagagccaagtgactgaacacgcattcccaactatatatctacagatgcattccattttaactcttcttgagctaaaacgtcaaataggagaggaagataagataaatatttgtaaataaaacctaaagtttaaatgttttaatctgaataattgtacataaaattttgtatctctaacattccaaattactgtcaataaaatatatatttattattttaaatgctatgtgttaatatttcacttgcttgtattagaaaggcaaaatgtaagactttggtatgtgtgacatatgctttatttggctttattttacaagtacagtatctgcaaaaaacaaagtaaccttttttcatacctgccagttttgaatttatatatgttattgaacaaatagtaatagaggattcgctgttgaaacaagttgtccaagcaatgttatattcatttttatacttattgggaaagtgtgagttaatattggacacattttatcctgatccacagtggagttttagtaattatattttgttgatttcttcattttgttttctggtataaaagtagagataatgtgtagtcacttctgatttagtgaaaccaattgtaataattgtggaaatgttttgtctttaagtgtaaatattttaaaatttgacataccctaatgttaataataaaaagaactatttgcatataaaaaaaaaaaaaaaaaa

SEQ ID NO: 327 - DNA, 2015 bp, Homo sapiens
  SITE (3): n equals a,t,g, or c
  SITE (2006): n equals a,t,g, or c
gcnacggggcgctctcgggctgccggcggggccgagcgccgcgcgtcccgagcatggcaggctccctgcctccctgcgtggtggactgtggcaccggtggccgatacgacatggaatcattgaagactgggatcttatggaaaggttcatggagcaagtggtttttaaatatcttcgagctgaacctgaggaccattattttttaatgacagaacctccactcaatacaccagaaaacagagagtatcttgcagaaattatgtttgaatcatttaacgtaccaggactctacattgcagttcaggcagtgctggccttggcggcatcttggacatctcgacaagtgggtgaacgtacgttaacggggatagtcattgacagcggagatggagtcacccatgttatcccagtggcagaaggttatgtaattggaagctgcatcaaacacatcccgattgcaggtagagatattacgtatttcattcaacagctgctaagggagagggaggtgggaatccctcctgagcagtcactggagaccgcaaaagccattaaggagaaatactgttacatttgccccgatatagtcaaggaatttgccaagtatgatgtggatccccggaagtggatcaaacagtacacgggtatcaatgcgatcaaccagaagaagtttgttatagacgttggttacgaaagattcctgggacctgaaatattctttcacccggagtttgccaacccagactttatggagtccatctcagatgttgttgatgaagtaatacagaactgccccatcgatgtgcggcgcccgctgtataagaatgtcgtactctcaggaggctccaccatgttcagggatttcggacgccgactgcagagggatttgaagagagtggtggatgctaggctgaggctcagcgaggagctcagcggcgggaggatcaagccgaagcctgtggaggtccaggtggtcacgcatcacatgcagcgctacgccgtgtggttcggaggctccatgctggcctcgactcccgagttctttcaggtctgccacaccaagaaggactatgaagagtacgggcccagcatctgccgccacaaccccgtctttggagtcatgtcctagtgtctgcctgaacgcgtcgttcgatggtgtcacgttggggaacaagtgtccttcagaacccagagaaggccgccgttctgtaaatagcgacgtcggtgttkctgcccagcagcgtgcttgcattgccggtgcatgaggcgcggcgcgggyccttcagtaaaagccatttatccgtgtgccgaccgctgtctgccagcctcctccttctcccgccctcctcaccctcgctctccctcctcctcctcctccgagctgctagctgacaaatacaattctgaaggaatccaaatgtgactttgaaaattgttagagaaaacaacattagaaaatggcgcaaaatcgttaggtcccaggagagaatgtgggggcgcaaacccttttcctcccagcctatttttgtaaataaaatgtttaaacttgaaatacaaatcgatgtttatatttcctatcattttgtattttatggtatttggtacaactggctgatactaagcacgaatagatattgatgttatggagtgctgtaatccaaagtttttaattgtgaggcatgttctgatatgtttataggcaaacaaataaaacagcaaacttttttgccacatgtttgctagaaaatgattatactttattggagtgacatgaagtttgaacactaaacagtaatgtatgagaattactacagatacatgtatcttttagttttttttgtttgaactttctggagctgttttatagaagatgatggtttgttgtcggtgagtgttggatgaaatacttccttgcaccattgtaataaaagctgttagaatatttgtaaatatcaaaaaaaaaaaaaaaggggsggccgctcctagagggtccctcgagggggccnagcttacgc

SEQ ID NO: 328 - DNA, 2136 bp, Homo sapiens
tcgacccacgcgtccgggctcaggatgagtgtggatggcatgaactcacactagcactggctccacctgtgctccttcggaaggagccctcagccctgagccccaaggctccagtgccctccccttgcggggcgggggcctcacaccctctgccgccctgtgctgagggccctgtggcctcccctttcttgcagtgtgagcagctacgagaagacccagagctatcccaccgactggtcagacgatgagtctaacaaccccttctcctccacggatgccaatggggactcgaatccattcgacgacgacgccacctcggggacggaagtgcgagtccgggccctgtatgactatgaggggcaggagcatgatgagctgagcttcaaggctggggatgagctgaccaagatggaggacgaggatgagcagggctggtgcaagggacgcttggacaacgggcaagttggcctatacccggcaaattatgtggaggcgatccagtgatgagtcggggacaggccagcggggggacggaggcggcgggcccaggagcctcagccagccacgtgggcatccactccttttcctgcaagagatgatggttccattgctcttggcttcatggtgttcctggaaggcagatgagctggtcatttcgcctgggactcggcacctttccgagtgcagctggagggatctgagcgcaggaagacgcagaacaacagaaatagccgcccctccccgcccactgtgcctgttggcctatcatagatctctatgttcttgactttgtctctcctttccgagtcaatggtgggttacactgatcttgttccactgattactctctctgacgagtccatcacctgcaacttaaatgaacaagcttacatcccattttgagggaagattttgaggtttttaatttaaaggctgtgtacagttatacttttttatacacctgttcatttctacttaaattatggcacagattgatgcgcaccagtcttgaggaaacgatctccctattcccttaccctgttactcagccacgccgtgtgtaggcttagcctcaggtggcagatgtttgaggaaaggaattatgccaggaaggtgggaccgggttatggtcgggtttctattgggaatgctctttgtgcttttgggcatctgaatggaagctttacatagaaccttaggtagaactcccccaaatcgccatatttaaaaattattttcactctattcttgcttaaaactgtactcttttgcaaattaacaattttatcactgattcagagttaaaaagaagactaacttttcaagcaaatgcatctgtaaagatgctttagattagactgtcatgtctcagtgtctatctgtatatattatttgatattcagagaatctaaagcactcgtctactgttttaatgagatttaacagcttttaacagtgagtttcgtttgtaaactgcttgaagtctgtggcattcaggcacacgtctggctggccggctgggtctcctcccgggctcagtgggcctggggcctctctgacgtggtgcctgctggagggaggctcgtcgtcaccagctgactgctggtccggcttctgaccggcctttgtcctggctccgtagcagaacactgtaaaagtgcccgcgtctttgcagtagttgcagatttcagtcgtcgtgttacttgtgcacaaacagaagctgggtcttacccgcagcacgagtgtctcgggctgcccggagtcgcccgggagcaggtgctgcagccagagttacgcgggggccacgcgggccggcgggggtggggggaacgtgggggaacctgtgtttcacgtgactcagcagtgcccgccgccgtcaccagctatgcattcactccgtttccagtgagcagatgtcttgcttggaaagtggacctgtgtctgtgtctgtcctgagaacttaccagcagaaatcctcatttctgtgctacggatttaccaaaaattgtcaagtctttttcagtttaacagttcctttacatgtgtagtatttgaggaaaaaaatcaataaacagttgatctcgtgcaaaaaaaaaaaaaaaaaaaaaaaaaaaaaaaaaaaaaaaaaaaaaaaaa

SEQ ID NO: 329 - DNA, 1446 bp, Homo sapiens
agaaggcggaggaggtgtatgcccagctgcaaaaaatgcttctggagcaacaagagaagtgcctgctgttctccaagcagttcatgcaccagggcaacgtggctgagaccacccgatttgagaagcttgctcaggaccgcaagaaacagctggagatcctgcagctggcccaggctcagggcctcgaccctcccacccaccactttgagttgaagacattccagactgtgaggatcttctcagaactcaacagcacagaaatgcatctgatcattgtccggggaatgaacctcccagcccctccaggggtgactcccgatgacctggatgcttttgtgcggtttgagtttcactaccctaactcggaccaggctcaaaaaagcaaaacagctgtggtgaagaacacaaactctccagaatttgatcaactcttcaaactaaacatcaaccgaaaccaccggggcttcaagagggtgatccagagcaaaggcatcaagtttgagatcttccacaaagggtccttcttcagaagcgacaagctggttggcacagcacacctgaaactggagcggctggagaatgagtgtgagatcagagaaattgtggaggtcctggatggaaggaagcccaccggggggaagctggaggtgaaggtgaggctgcgggagcctctgagtggccaggatgtgcagatggtcactgagaactggctggttctggagcccaggggcttgtgagccgatggccagcaccaggagaggagtcaggccgcgactgtgcaggagatgactttcccagctttgctggcttcagaagcctttgtacataagagatgctgctacccaagcaccaaagacctgttaagcatgtgcactactgaccacgactctggtctttcctgttgttggcccctctggggctctacagaaacaggctgggttccaggagcccatctccccgctgtctccccctgccccgagtctggaagagggcaaggacacttccattcctctgtaccatggagtcctgcagccccttaacccctgcgtggcaactgtgtacagcttacccctgcctccagttgcaccacttctagatgtgcctttaaaagatctaactatgggatgggagaacttgagggtgatcgggaacctcccctgctgagggtggtgtcagggttccgtgactccagtgggccagtggtagcctgtcccagacaactccgtcaccccagctctgcctgtgcctttatccctgacagctgctgcactagccttcctgcttccctaaggacttagtggagggggaaagttgtttttggtactacttggtgggaagtaaggggaaggttggatcttgggtttggtctacccacccaagagaaaagactgttaactggaagaaaaaatatatatataaaattttatgtaaaaaaaaaaaaaaaaa

SEQ ID NO: 330 - DNA, 1696 bp, Homo sapiens
ccacgcgtccgcggacgcgtgggtggagagtggagggacctggtgaatcatccaagattaaatacgggcaggcactgccaggcttgtgtggagatgaggctgggacactgttcgcaggaagagtccggtgttctggccccctgatgtcaccttcacgggcctgactcacagtcctaaatatctgacagcgagatcgcttttcgtgccctcgtgaggctggcatgcaggatggcaggacagcccggccacatgccccatggagggagttccaacaacctctgccacaccctggggcctgtgcatcctcctgacccacagaggcatcccaacacgctgtcttttcgctgctcgctggcggacttccagatcgaaaagaagataggccgaggacagttcagcgaggtgtacaaggccacctgcctgctggacaggaagacagtggctctgaagaaggtgcagatctttgagatgatggacgccaaggcgaggcaggactgtgtcaaggagatcggcctcttgaagcaactgaaccacccaaatatcatcaagtatttggactcgtttatcgaagacaacgagctgaacattgtgctggagttggctgacgcaggggacctctcgcagatgatcaagtactttaagaagcagaagcggctcatcccggagaggacagtatggaagtactttgtgcagctgtgcagcgccgtggagcacatgcattcacgccgggtgatgcaccgagacatcaagcctgccaacgtgttcatcacagccacgggcgtcgtgaagctcggtgaccttggtctgggccgcttcttcagctctgagaccaccgcagcccactccctagtggggacgccctactacatgtcaccggagaggatccatgagaacggctacaacttcaagtccgacatctggtccttgggctgtctgctgtacgagatggcagccctccagagccccttctatggagataagatgaatctcttctccctgtgccagaagatcgagcagtgtgactaccccccactccccggggagcactactccgagaagttacgagaactggtcagcatgtgcatctgccctgacccccaccagagacctgacatcggatacgtgcaccaggtggccaagcagatgcacatctggatgtccagcacctgagcgtggatgcaccgtgccttatcaaagccagcaccactttgccttacttgagtcgtcttctcttcgagtggccacctggtagcctagaacagctaagaccacagggttcagcaggttccccaaaaggctgcccagccttacagcagatgctgaaggcagagcagctgagggaggggcgctggccacatgtcactgatggtcagattccaaagtcctttctttatactgttgtggacaatctcagctgggtcaataagggcaggtggttcagcgagccacggcagccccctgtatctggattgtaatgtgaatctttagggtaattcctccagtgacctgtcaaggcttatgctaacaggagacttgcaggagaccgtgtgatttgtgtagtgagcctttgaaaatggttagtaccgggttcagtttagttcttagtatcttttcaatcaagctgtgtgcttaatttactctgttgtaaagggataaagtggaaatcatttttttccgtggaaaaaaaaaaaaaaaa

SEQ ID NO: 331 - DNA, 3747 bp, Homo sapiens
  SITE (3746): n equals a,t,g, or c
cgcgcctgcaggtaccggtccggaattcccgggtcgacccacgcgtccggtgtttcctgccctatcacacactgaggaccgtccacttgacgacatggaaagtgggtttatgcaaagacagactgcataaagctttggttatcacactggccttggcagcagccaatgcctgcttcaatcctctgctctattactttgctggggagaattttaaggacagactaaagtctgcactcagaaaaggccatccacagaaggcaaagacaaagtgtgttttccctgttagtgtgtggttgagaaaggaaacaagagtataaggagctcttagatgagacctgttcttgtatccttgtgtccatcttcattcactcatagtctccaaatgactttgtatttacatcactcccaacaaatgttgattcttaatatttagttgaccattacttttgttaataagacctacttcaaaaattttattcagtgtattttcagttgttgagtcttaatgagggatacaggaggaaaaatccctactagagtcctgtgggctgaaatatcagactgggaaaaaatgcaaagcacattggatcctacttttcttcagatattgaaccagatctctggcccatcaggctttctaaattcttcaaaagagccacaacttccccagcttctccagctcccctgtcctcttcaatcccttgagatatagccaactaacgacgctactggaagccccagagcagaaaagaagcacatcctaagattcagggaargactaactgtgaaaaggaaggctgtcctataacaaagcagcatcaagtcccaagtaaggacagtgagagaaaagggggagaaggattggagcaaaagagaactggcaataagtaggggaaggaagaatttcattwtgcattgggagagaggttctaacacactgaaggcaaccctatttctactgkttctctcttgccagggtattaggaaggacaggaaaagtaggaggaggatctggggcattgccctaggaaatgaaagaattgtgtatagaatggaagggggatcatcaaggacatgtatctcaaattttctttgagatgcaggttagttgaccttgctgcagttctccttcccatkaattcattgggatggaagccaaaaataaaagaggtgcctctgaggattagggttgagcactcaagggaaagatggagtagagggcaaatagcaaaagttgttgcactcctgaaattctattaacatttccgcagaagatgagtagggagatgctgccttcccttttgagatagtgtagaaaaacactagatagtgtgagaggttcctttctgtccattgaaacaaggctaaggatactaccaactactatcaccatgaccattgtactgacaacaattgaatgcagtctccctgcagggcagattatgccaggcactttacatttgttgatcccatttgacattcacaccaaagctctgagttccatttkacagctgaagaaattgaagyttagagaaattaagaagcttgtttaagtttacacagctagtaagagttttaaaaatctctgtgcagaagtgttggctgggtgctctccccaccactacccttgtaaacttccaggaagattggttgaaagtctgaataaaagctgtcctttcctaccaatttcctccccctcctcactctcacaagaaaaccaaaagtttctcttcagagttgttgactcatagtacagtaaagggtggaggtgatatggcattctgaaagtagggagggactaagtcagtcgtcatactaaacaaaaatcccagtaccctttccttatttagctaccagaatgatgacagacagactcaaaccctgtcaagacaggaccctggaggatcctcctatggggamactgcataatctgaaaaaaaggctgacagatacaaatagttgaggatccttcaacacaaaagctgcgtgtctgccctattactcacctgacgatgaagcccacaatgcaacaaatcccttccactcacagcatttggtcaacctgtcagagcctcattcttaattatgaacagtagtcaatgaacacaatacatttgagggaaaggccgtaacatgaaaggcaccaacaaataaatgtgagagtagatagagaccttttgagtataaaagatcctccaaaataagagattaaaccaagatagaggaaaacacagtagctgggaaacaaggaatccaacgcaggagaaagtgaagagaattcccaggatgttggtgtgtagcaggcttagaaagcaagtcattcatgttggagcaggactcttaaaggactctaggagagatgtctcccagaaaaagaagaaattaattgattcatacacattgagagggatttagatttctcttgcagagattgagataaactagtcataaatacatagaaaaataagcaagtaaaaacgcaatacagtttttaagtgctagaggaaaagaaacttttgtattagagaggaaatataaccacagtacactacatggctcagctgtgaataatatttacatagaggataatgtgaatataatagtctcccattatctgtggttttgctttctgcagttcagttacagccagccagtctgaaaatattaaatggaaaattccagaaataattcttaagttttaaaacatgtgctgttttgagtagcatgttgaaatctcgcactatcaccctccacccatgttctgggcagggcaaagtgggatggtgtgagatttctccagtggatccacaatgtatatgctacccacccatgagtcacttagtcatcatccagttgctcagatcaactgttgtggtataacagtgcttgtgttaaagtcactcttattttacttactaatgtccccaaagcataagagtagtgatgctggcaaataagatacaccaaagagaagctgtaaagtgcttcctctaacagaaaatgtgaaagttcttgacttaataaggaaagaaaaaaaacacatgctgaagttgctaagatctacagtaagaacaaatccatctgtaaaattgtgaagaaggcaaaagaaatttgtgctagttttgctgttgcaccacaagctgcaaaaattatttattacaccccacggtgtgtgataaacacttagttaagatgaaaaggtattaaatttgtgggtggaagacatgaacagaaatgtgttccaattgacagcaatcgggtttggtactatttgggtttggtgctattcgtattcagggtcttggaatgcaactcccacagataagggggtgctgctggagtgaaatactgtgatataacctttttttcaggaaatgaagggagaagatgtgtacgtgtgtgggagaggtataagagacctaggttgccatattctatcacagaaaatgcataataactaaatctggaaaatgatgaatagctgtacaaccatattatttagcaataggaggtaaatacaggtagaagcagaagaaagaatgggcaggggttacctctatggagaagctggggtgggaggatagggtggggacttattttacgaactgtgtaattgcctaacttgtgaatatgtatttctgaagtaaaataaaaattaagttaaaattaaattttaaaattcaaaaaaaaaaaaaaaaaaaaaaaaaaaaaaaaaaaaaaaaaaaaaaaaaaaaagggcggccgcnc

SEQ ID NO: 332 - DNA, 1322 bp, Homo sapiens
cggccgccgagcccccgagggcgcgccctgacggactggccgagccggcggtgagaggccggcgcgtcgggagcgggccgcgcggcaccatgtcggccaaggtgcggctcaagaagctggagcagctgctcctggacgggccctggcgcaacgagagcgccctgagcgtggaaacgctgctcgacgtgctcgtctgcctgtacaccgagtgcagccactcggccctgcgccgcgacaagtacgtggccgagttcctcgagtgggctaaaccatttacacagctggtgaaagaaatgcagcttcatcgagaagactttgaaataattaaagtaattggaagaggtgcttttggtgaggttgctgttgtcaaaatgaagaatactgaacgaatttatgcaatgaaaatcctcaacaagtgggagatgctgaaaagagcagagaccgcgtgcttccgagaggagcgcgatgtgctggtgaacggcgactgccagtggatcaccgcgctgcactacgcctttcaggacgagaaccacctgtacttagtcatggattactatgtgggtggtgatttactgaccctgctcascaaatttgaagacaagcttccggaagatatggcgaggttctacattggtgaaatggtgctggccattgactccatccatcagcttcattacgkgcacagrgacattaaacctgacaatgtccttttggacgtgaatggtcatatccccctggctgactttggatcatgtttgaagatgaatgatgatggcactgtgcagtcctccgtgcccgtgggcacacctgactacatctcgccggagatcctgcagccgatggaggacggcatggccaaatacgggcctgagtgtgactggtggtctctgggtgtctgcatgtatgagatgctctatggagaaacgccgttttatgcggagtcactcgtggagacctatgggaagatcatgaaccatgaagagcgattccagttcccatcccatgtcacggatgtatctgaagaagcgaaggacctcatccagagactgatctgcagtagagaacgccggctggggcagaatggaatagaggatttcaaaaagcatgcgttttttgaaggtctaaattgggaaaatatacgaaacctagaagcaccttatattcctgatgtgagcagtccctctgacacatccaacttcgacgtggatgacgacgtgctgagaaacacggaaatattacctcctggttctcacacaggcttttctggattacatttggccattcattggttttacattcacaacggaaagctgtttttctga

SEQ ID NO: 333 - DNA, 2925 bp, Homo sapiens
ggtacgcctgcaggtaccggtccggaattcccgggtcgacccacgcgtccgcagggaggggtgcgaggctagccacgcaggcggggccctgggtcattttaaactctcagagtgaacgtcttgataggaccgacaagacgcatgacatgtacttagaaagcttatcttagagccacactgagattggaacccgcaaaatatgccaggaaacgccaccccagtgaccaccactgccccgtgggcctccctgggcctctccgccaagacctgcaacaacgtgtccttcgaagagagcaggatagtcctggtcgtggtgtacagcgcggtgtgcacgctgggggtgccggccaactgcctgactgcgtggctggcgctgctgcaggtactgcagggcaacgtgctggccgtctacctgctctgcctggcactctgcgagctgctgtacacaggcacgctgccactctgggtcatctatatccgcaaccagcaccgctggaccctaggcctgctggcctgcaaggtgaccgcctacatcttcttctgcaacatctacgtcagcatcctcttcctgtgctgcatctcctgcgaccgcttcgtggccgyggtgtacgcgctggagagtcggggccgccgccgccggaggaccgccatcctcatctccgcctgcatcttcatcctcgtcgggatcgttcactacccggtgttccagacggaagacaaggagacctgctttgacatgctgcagatggacagcaggattgccgggtactactacgccaggttcaccgttggctttgccatccctctctccatcatcgccttcaccaaccaccggattttcaggagcatcaagcagagcatgggcttaagcgctgcccagaaggccaaggtgaagcactcggccatcgcggtggttgtcatcttcctagtctgcttcgccccgtaccacctggttctcctcgtcaaagccgctgccttttcctactacagaggagacaggaacgccatgtgcggcttggaggaaaggctgtacacagcctctgtggtgtttctgtgcctgtccacggtgaacggcgtggctgaccccattatctacgtgctggccacggaccattcccgccaagaagtgtccagaatccataaggggtggaaagagtggtccatgaagacagacgtcaccaggctcacccacagcagggacaccgaggagctgcagtcgcccgtggcccttgcagaccactacaccttctccaggcccgtgcacccaccagggtcaccatgccctgcaaagaggctgattgaggagtcctgctgagcccactgtgtggcagggggatggcaggttgggggtcctggggccagcaatgtggttcctgtgcactgagcccaccagccacagtgcccatgtcccctctggaagacaaactaccaatttctcgttcctgaagccactccctccgtgaccactggccccaggctttcccacatggaaggtggctgcatgccaaggggaggagcgacacctccaggcttccgggagcccagagagcatgtggcaggcagtggggcctcttcatcagcagcctgcctggctggctcccttggctgtgggcaggtagcacgcctgctggcagaggtacctggtggctgccctgttcgcatcagtggcgatgactttatttgcggagcatttctgcaagcgttgcctggatgcggtggtgcattgtgggccctctgggctcctgcctcagaatgtcagtgagcaccatgctggaggtcacccagcactgtggcagcgcccaggagggcatagggcagcctaccacctccaagggggcaggcgccctcatctggggttgggtctgtgctgagctggagggcctctagggaaccgtggggcagggtggccagctgctggctcccagagcgcagccaggcgtcctcaacggggagccccaaatgtccacgcccagaacaacagttggcaggacaggtgtgacacagccacagcagaggcaaggggtgccaggagtccccagcggcatcctcggggagatgctggtgaggggtccgtacagggtggggtccccaccyctagccccttactgargggggagtgcagcagttggcctgcttgtctggcggagaaagccagctccctgcaccctcggggctgagtcagatctgggtctgccgcaaaggccttgcctagaccaggtcacactgatgccctggtttccctatctgtaaaatggggccaatgacacctacctcactgggtcaccatcgagatcaatcctcctccctgccccgacacctcgggcacatcgcatgcactcagagcacagagccgggcagacgcagcacctgcatggggagcccagtgcccggcacagcacaggggcttccagggaggccacgcagggccgtggggctgagccacgctctcgttttgtcaggcagctatgcagttgctcttccttgtttttgttttgtttttgtttttgtttttaatatttatttttttagagacagggccttgctctgttgcctgggctggagaacagtggcaccatcatagctcactgcagcctcaaactcctgggctcaagcgatcctccccgctcagcctcctgagtagctgggactacaggtgtgcaccaccacacccagccaaaacagccatcctccccttgagagtcatcagaaaaatacattaggaaaatgtgtttagaaataaaagcacaaggcagggcagtgctcacgcctgtcatcccagcactttgggaggccgagacgggaggatcagttgaggtcaggagtttgagaccagcctcggcaacatggcaaaatcttgtctcttttttttggtattaaaaaaatcataaaaataaaagaaataatgcaaaaaaaaaaaaaaaaaaa

SEQ ID NO: 334 - DNA, 1857 bp, Homo sapiens
taaccctcactaaagggaacaaaagctggagctccaccgcggtggcggccgctctagaactagtggatcccccgggctgcaggaattyggcacgagctggatggcccccgaagtgatcaagtcttccttgttttctaagggaagcgacatctggagctatggagtgctgctgtgggaactgctcaccggagaagtcccctatcggggcattgatggcctcgccgtggcttatggggtagcagtcaataaactcactttgcccattccatccacctgccctgagccgtttgccaagctcatgaaagaatgctggcaacaagaccctcatattcgtccatcgtttgccttaattctcgaacagttgactgctattgaaggggcagtgatgactgagatgcctcaagaatcttttcattccatgcaagatgactggaaactagaaattcaacaaatgtttgatgagttgagaacaaaggaaaaggatcataaaactaacagaggagactggcgtttgtgcagaggcctgggctgtcatctaagtgaataatccgctgaaaaggtttcggcttggattgtcctgactgcaaagaccttcgtcccatgaggacctgagtgaccagggcttgagcagaggaagagggaatttcagcttctccttgtgcacaggaggagcccgtggccgaggggtcgccagtgtagtgtaatagacggaattcccttcttcctgctgggaatgattccggtgggtgtgaatctgtgtcgcaggagctgcgatcccgggaagaggagctgactcgggcggctctgcagcagaagtctcaggaggagctgctaaagcggcgtgagcagcagctggcagagcgcgagatcgacgtgctggagcgggaacttaacattctgatattccagctaaaccaggagaagcccaaggtaaagaagaggaagggcaagtttaagagaagtcgtttaaagctcaaagatggacatcgaatcagtttaccttcaggtatgatcttgtttttatgtttttgaaagatttttgtgtgtcctccttttaatcagttttctttgttcatcagaaccaggaaagagatagggaagtaactttgtaaaacagtgaatgaatgagtatcttcagctgtaggcttagattcatggttctaatgtaatggcctaatgagattccatgtaggaaacagcattaggagcacgtggtagtcacagcacacgaggatctaaccctcagcgtactttcatattgatggattaactgattgactccttttgaaattgaagcagaaccattttttagctgagcgtactgagccaatgtcatgtggcattgtgaagatgcaaaacaacgaaactgttaatatttcatcattacgttcattgcttccacaaggatctaggatgtcatctggtatctgggacactgatattgktgtcagcactttcaataaaatatatcaagtaccctgaggtactttcccatgaaggtttaaaatccttcagacacaaaaatcacccagtaaatctagggaagcttttttaaacattgkgatamcaacatacmaggattactaaatcattttagtaatgtgttaggagaaactaaagggaatagaaaatatatcaatcaatcaatacatatagatattattgactgataatcaaaatatatcgatcaatatagcagacatagcttgattcactaaattaagttctttaatattatatattctacttgttgtaaggaaaaaacaaatacctccatggtattttgtgattctttctagtaccagagcaggatgatgacagagcaatgcagacttcacttttatagaatctgtatga

SEQ ID NO: 335 - DNA, 357 bp, Homo sapiens
  SITE (264): n equals a,t,g, or c
  SITE (314): n equals a,t,g, or c
ataggaaaaagaaaagcacacaagttttatttggaatgaaggcaattcacaggtcacaaaataattcatgctgaaagggcctgcagagttcttgcactgtgatgtcttcgagccatctttattgtcatgctgcatgcacgtatagaaaatggaataggtccattctatgtagccatttttgattttctgaaccacctaactacttgtacccacctgcaatgtgtaattcatggggcagtgccctccttacacaaccgcacacgntcacaggcaccaactcacagggattctccttgtccacggtacctgtgagnccaaagtgacagccccacaaaggagctttcacaaatttccaaa

SEQ ID NO: 336 - DNA, 318 bp, Homo sapiens
  SITE (269): n equals a,t,g, or c
  SITE (302): n equals a,t,g, or c
  SITE (305): n equals a,t,g, or c
aattcggcacgcggrgatattttacattgtttgaaattagccttcaaaatccaatggacattttatgcttaagcgcatctcaattcagactagtcacattttgggtgctcaagagccactcgtggctatagtggccacttggtggacagcaaagctccaggcttcaagggaggaggggctcaacaggtaacatagtaagtgggctgtgggggaggttggcaggctagaggggcaccttatgcaaagtcccgccaagcaagacacaaagntcctggtttgtttgtgtttttgttttgttttgntgnttttggaactagg

SEQ ID NO: 337 - DNA, 362 bp, Homo sapiens; identical to SEQ ID NO: 13
  SITE (248): n equals a,t,g, or c
  SITE (296): n equals a,t,g, or c
  SITE (347): n equals a,t,g, or c

SEQ ID NO: 338 - DNA, 576 bp, Homo sapiens
  SITE (161): n equals a,t,g, or c
  SITE (473): n equals a,t,g, or c
  SITE (531): n equals a,t,g, or c
aattcggcacgagcccaaaaggaaccgtccaagcttggggtgtatttttggcgctcccaccgcggccgagctcgagcccggagatgaggggaaagaggaggaggaaatggtggctgagaacaggaggcggaaaaccgcgggcgtactgccggttgagcctnaatgacagtgaagtggacatgtttggtgactatgatagctttactgaaaactcctttatagctcaagttgacgacctggaacaaaaatatatgcaactccctgaacataagaaacatgctacagactttgccactgaaaatctttgctcggaaagtatcaaaaacaaactcagcattactaccataggcaaccttactgaattacaaactgwtaagcacacagagaaccagagtggatatgaaggtgtcactattgaacctggagctgatcttttgtatgatgtaccttcctcacaggctatatactttganaatttgcagaactcttcaaatgatttgggtgatcattctatgaaagacagggattggnagtcatcctctcacaacactgtgaatgaggaactgccccataatt

SEQ ID NO: 339 - DNA, 410 bp, Homo sapiens
  SITE (359): n equals a,t,g, or c
  SITE (362): n equals a,t,g, or c
  SITE (383): n equals a,t,g, or c
gggcacgcagaatctacagcttgtgtgttttaccgaactacgaaatagagaagtgtttggatggactggtgaactaggacctggaatttactggttaattccttccacaactggctgtaggctgaggaaaaaaataaaaccagtaacagatgaagcccaacttgtatatagagatgaaacaggggaattattccttacaaaggaatttaagtctactttatcagatatatttgaagtaattgatttagatggaaatggtcttcttagccttgaagaatataatttttttgaattgagaacagtggtgagaaatgtgatgaagatgcttggggcgtctgcagagagaatttgataccaanganggatgaactaaccaggaccanggtttatgggatttgaatctaatggaa

SEQ ID NO: 340 - DNA, 479 bp, Homo sapiens
  SITE (379): n equals a,t,g, or c
  SITE (393): n equals a,t,g, or c
  SITE (405): n equals a,t,g, or c
  SITE (434): n equals a,t,g, or c
acctgcaatgaaggcttgctcctggtgggagcaagtgtgctacagtgcttggctactggaaactggaattctgttcctccagaatgccaagscattccctgcacacctttgctaagccctcagaatggaacaatgacctgtgttcaacctcttggaagttccagttataaatccacatgtcaattcatctgtgacgagggatattctttgtctggaccagaaagatkggattgtactcgatcgggacgctggacagactccccaccaatgtgtgaagccatcaagtgcccagaactctttgccccagagcagggcagcctggattgttctggacaatcgtggagaatttcaatgtttgggttccaactggccatttctnttgttaacaagggntttaagttgganggggcccaataatgtgggaatggcaaaanttttgggaaggatgggtcagttaatttcaaccaacctgcaaaggg

SEQ ID NO: 341 - DNA, 492 bp, Homo sapiens
  SITE (465): n equals a,t,g, or c
  SITE (472): n equals a,t,g, or c
  SITE (487): n equals a,t,g, or c
tcgacccacgcgtccggatcgacattgtggccatcattccttattttatcactctgggtaccgagctggccgaacgacagggcaatggacagcaggccatgtctctggccatcctgagggtcatccgcctggtaaggtcttccgcatcttcaagctgtcgcgccactccaaggggctgcagatcctcgggcaaacrctgaaggcatccatgcgggagttggggttgctcatcttctttctcttcattggagtcatcctcttctccagtgcagtctactttgctgaggtggatgagccagagtcccatttctctagcattcctgatggcttctggtgggcagtggtcaccatgacaactgttaggctatggggacatgtgcccgaccaccccaggggggtaaggattgtgggcactctgtgtgccattggcaggggtcctcaccattgccctccttgtggcctgtnattgttntccaactttcaattnatttt

SEQ ID NO: 342 - DNA, 483 bp, Homo sapiens
  SITE (411): n equals a,t,g, or c
  SITE (464): n equals a,t,g, or c
ggggtcgacccacgcgtccgtgaaatagcattttctctmmttttcccagcactagtatataacctatgaggaacccttgtctctgaatctgctcagcttgaaattttgtctctgaaagaagttggtgacattaaggcatctacagagatgaggttaagaagattccagtcagtggaaagtggagcaaataacgttgtcttcatcaggacacttgggatagagcctgagaaattggtgcatcatattctccaggatatgtacaaaaccaagaaaaagaagactcgagttattttgcgaatgttacccatctcaggcacatgcaagctttttagaagatatgaaaaaakatgcagaaacatttttggaacccyggtttaaagctcccaacaaagggacattcagatgtgtacnaatctcgaaaatacccagtcctgtgaatagagaagaagttatcagaggaattngcagggatagtgtgcaccc

SEQ ID NO: 343 - DNA, 381 bp, Homo sapiens
  SITE (321): n equals a,t,g, or c
  SITE (360): n equals a,t,g, or c
  SITE (380): n equals a,t,g, or c
agaaatatgcttgttttagcatctaaaatgattattggatactgttcataatcatcatgggagctacaatttttaattgcttcaactcaattttagtataaatatgacctaatcatttgttcagctgaagaaacttttctgctggtgacactgcaattagcaaatacttcgggttaattcctgaaaacctgatgcagaaaatcagattttcttctaagcttgtaatgatgctttgcaaaggtttccttaaggcttgaaatagtattcactattttccatttagctttaaagcatactgtattcagaagttgatatccacantctttcttttagggaaacaaattaggcagcccaggatanggatttttaattgggcaganc

SEQ ID NO: 344 - DNA, 342 bp, Homo sapiens; identical to SEQ ID NO: 21
  SITE (134): n equals a,t,g, or c
  SITE (286): n equals a,t,g, or c

SEQ ID NO: 345 - DNA, 413 bp, Homo sapiens
  SITE (253): n equals a,t,g, or c
  SITE (387): n equals a,t,g, or c
tagaggctaaataagtatttgttgaatgaatccatttgtgtgagccacattatttacattctttatttcagctaaagaatattgtagaacattatttgcctatgaaggtactaatgaagatgaacttacttttaaagagggggagataatccatttgataagtaaggtaaggtgtttctgtttttcagtgaattgcttaatttatttatagaaatatttttcaaaagttatacattcaccctagagtgttctnatattcaccctggaatctagaagagctgggactttgtcttgttctaagtcctgaaaactttgcacgtaataagtgctcagaccgtctctttttgagctaacttttattgctatattgttgtaatttccatattngggattattgttaaccatcatattgg

SEQ ID NO: 346 - DNA, 631 bp, Homo sapiens
  SITE (45): n equals a,t,g, or c
  SITE (472): n equals a,t,g, or c
  SITE (480): n equals a,t,g, or c
  SITE (534): n equals a,t,g, or c
  SITE (544): n equals a,t,g, or c
gcaatatccccaggctttccattctgccctctactcctgacaccngtggcctggggcctggttggggccatagcgtatgctggtgtcctgggaactattgagctgaagctagatctagtgcttctaggggctgtggctgcagtgagctcattcctcccttttctgtggaaagcctgggctggctgggggtccaagaggcccctggcaaccctgtttcccatccctgggcccgtcctgttactcctgctgtttcgcttggctgtgttctwctctgatagttttgttgtagctgaggccagggccacccccttcctkktgggctcattcatcctrctcctggttgtccagcttcactgggagggccagctgcttccacctaagctactcacaatgccccgccttggcacttcagccacaacaaaccccccacggcacaatggtgcatatgccctgaggcttggaattggggtgnttttatgnacaaggctagctgggctttttcatcgttgccctgaagagacacctgtttgccantcctctcccnggctgagtcctctggcatccatggtgggtggtcgagccaagaatttgtggtatggaacttgtgtggcagcgctggtagccctgtaac

SEQ ID NO: 347 - DNA, 457 bp, Homo sapiens
  SITE (3): n equals a,t,g, or c
  SITE (17): n equals a,t,g, or c
  SITE (78): n equals a,t,g, or c
ctnaggcccaagtttangattgatttgatttgataggataagttttacagttcagacccctttgattaccctggattnaagactcttacacaatatcgggggggaaccacagttaatgcctgcttctgactgaagycctcttgaacaggcagagacatcctcctgacaaccaggatggcataatcttagttcaggatctggggaaaagctattttgaatgtaaaactgggtacaggtggtaccattccagtgtcttacgtgaagatcccaggaaagttggacctaagttttcctcaagagggcagactaaaatacaaccagggcatatgccggtcctgcagcctaataaatagccccaaagactggtgtaaaaagaaggcttttccatcaactacagaagaggaaaatagtggtggacaaaaatcagcagcagctaccaaaggaatgctcccagtgg

SEQ ID NO: 348 - DNA, 299 bp, Homo sapiens
  SITE (295): n equals a,t,g, or c
gaagtgattgagggccgacagttaagtggtaacaacataaggcctgtggtcaaagttcacgtctgtggccagacacaccgaacaagaatcaagagaggaaacaaccctttttttgatgagttgtttttctacaatgtcaacatgaccccttctgaattgatggatgagatcatcagcatccgggwttataattctcactctctgcgggcagattgtctgatgggaatttaagattgatgttggatttgtttatgatgaacctggccatgctgtcatgagaaagtggcttcttctnaatg

SEQ ID NO: 349 - DNA, 713 bp, Homo sapiens
  SITE (208): n equals a,t,g, or c
cccacgcgtccggtagtgtgtggatgaacacaatgtaatctttactggcctctttcttatagttcagactccatgtttgaacagctttggtgtttttagtttttattcatttctttttttaaaaaaatgaattatgggtgattcagggtttaatgttgtatcctaattgtgaaatctgtgcttttggacctgagcagatacctttganaccattacctcatctgttactaggaagaatgagctagcatttacattcctcccccctggcaagtctgaaaagaaatactttcccccctttttggaatgaagagactatctataattttatttgtacctttatccacaatacactgttttttccatttgatcctcttatcaaccttgtaggatcattattattattcttactttgcagttgaggaaacagacttgttggcaagtgacatagccaagacttgaaagttttttaaaattcaaagcccacattcattatcatagctactttatatctttccactgggataacaggacatgcctaattggctttttaaattaataaatatcagtttatattgctgggtcatcccccccccatagtgtttttaaataattttaaaactatcagccgattaaaaattattttaaataaatgtgatatgtgtgtgtgccctttcttcccccccaaaacccttttttccccccccccccccccc

SEQ ID NO: 350 - DNA, 505 bp, Homo sapiens
  SITE (383): n equals a,t,g, or c
  SITE (384): n equals a,t,g, or c
  SITE (456): n equals a,t,g, or c
  SITE (464): n equals a,t,g, or c
  SITE (474): n equals a,t,g, or c
ggcacgagccaccatggccacggacgagctggccaccaagctgagccggcrgctgcagatggagggcgagccccagtcgcccagccgccgcgtcttcaacccctacaccgagttcaaggagttctccaggaagcagatcaaggacatggagaagatgttcaagcagtatgatgccgggcgggacggcttcatcgacctgatggagctaaaactcatgatggagaaacttggggcccctcagacccacctgggcctgaaaaacatgatcaaggaggtggatgaggatttgacagcaagttgagcttccgggattcctcctgatcttccgcaaggcggcggccggggagtttcaggaggacagcgggttgtgcgtgttggcccgnntttttgagatcgacgttttccattgagggtttcaaagggggccaagagttttttttgaggccaagttccagncatcaaantgttccagcnttttgaggagggatcaaagcagagcaggagg

SEQ ID NO: 351 - DNA, 514 bp, Homo sapiens
aattcggcagagcggctcagcgacgccacggccagcagcgctcgcktcctccccagcaacagttactcaaagctaatcagatagcgaaagaagcaggagagcaagtcaagaaatacggtgaaggagtccttcccaaagttgtctaggtccttccgcgccggtgcctggtcttcgtcgtcaacaccatggacagctcccgggaaccgactctggggcgcttggacgccgctggcttctggcaggtctggcagcgctttgatgcggatgaaaaaggttacatagaagagaaggaactcgatgctttctttctccacatgttgatgaaactgggtactgatgacacggtcatgaaagcaaatttgcacaaggtgaaacagcagtttatgactacccaagatgcctctaaagatggtcgcattcggatgaaagarcttgctggtatgttcttatctgargwtgaaaactttcttctgctctttcgscgggaaaaccactggacaagcagcgtggagtt

SEQ ID NO: 352 - DNA, 530 bp, Homo sapiens
  SITE (515): n equals a,t,g, or c
  SITE (525): n equals a,t,g, or c
gtcatatctctgtagatttttgtgtatttaaactatttcacaattttttaaagtattaattttaaaaagcttgtgtttggagatgtgagtattcttccctccttttttcaacaaactagggcttagaaaagtgcttgtatcttaatgcagtatgcaggtttccagggaaaatgtgtaaatgtctttatacccttcgatgctgctgcccaccagtgatgtaaatcacaaagcataacycttgttttgttctgttgagcagcatgagatactttgatagagcagccttatttgtggaagcttgcctcaagtatggagcatttgaagtcactgaggacacagagaaactcatcactgctatatatgcagattatgcccggagtttgaagaacctcggttttaagcagggagcagttctctttgcttcaaaagccggagcagctggcaaagacttattgaatgagcttgagttccccaaggaagaacccatggaagagtgacagcctaataaatgccanggaatctganctgga

SEQ ID NO: 353 - DNA, 489 bp, Homo sapiens
  SITE (482): n equals a,t,g, or c
  SITE (488): n equals a,t,g, or c
ttctgaataaaaaggatatagcagttgggataggcttgggttcttgtcctttatgttcttgtcctttcctcatgataatcaaatcataattagaaataagatgctaagaatacaaaggtggctctatgttaatactgtattgataggtcaaaggagaaaaagcatgagatcaattcattagatactgaaaagtcttttgagggaatttaatgtcttcttgctttctttattaacagaataggaataaataatagcataggcataaattaaaaataatgtaattttttaaaatctcaaactaaaaatggggawtcatacttaaacattagcattcccaggagagttgggagccaagacctctggtgcccactatcactcaaccatttccattatttaagtcctagcaagtgccaaaccagaaaagatgcctaaatatttagagaagggaaagttattttttgccaatgggcggaatttttaanccgggna

SEQ ID NO: 354 - DNA, 3945 bp, Homo sapiens
  SITE (463): n equals a,t,g, or c
gatttgctattaaacttcaaaatctacaaactgtaagacttgtatttaagattcaaacccagactcccaggaagaaaaccattggagaatgctcaatgtcactcagaacccttagcacacaggaaatggattactctttggatataacaccaccttcaaaaatttctgtttgccatgcagaacttgaattggggacttgttttcaagcagtaaatagcagaattcagttacaaattcttgaggcacggtaccttccaagctcatcaacacctctgactttgagttttttcgtgaaggtgggaatgtttagctcgggagagttgatttataagaaaaagacacgcttactgaaggcctccaatggaagagtcaagtggggagagactatgatttttccactyatacagagtgaaaaagaaattgtttttctcattaagctttacagtcgaagctckgtaagaangaaaacactttgtggggccagattkggataagtgaagacagtaataacattgaagcagtgaaccagtggaaagagacagtaataaatccagaaaaggttgttatcaggtggcacaaattaaatccatcttgaagacttcacacattaatttggtgaagaacttgacattcttttagaagacttatgatttcaatttgctaccaatgagaagaggcaaatcaacaaatttgtcaatttatgggggctataattatggtatataatgtatctgatagaaaatttgataagaaaatgtaatgaattttatcagatatccaaagtaaaggaaatgttttaaaactgcaacaagagacacagacagtaaaatcaaagtattattaggatgactaaataaattataaagtctgtgagaatatcaaccatagatagttctttctatattatgtttttgcttttgtattttaagctttacttagatattcaaaacctggtatatcaagtctctgttagtactattggcatttagaagactttaccattatttcagtgctaggcattattgattaggtcttggctccactgtttacctcttgctatgtattttctcccggtaaaaatgaattgrrccatttcaactattttctatatttggagaaagtttgtgccctgtgttttataatttttttacccataagacatcacattatccctttgtaagctacttatctccaaaaaacttcagaaatagaaaactacattttggcaggaataattgaaaacaccagaaggttgaagtttaattggaaacccagaatatacatactttgctgttttcttccctcaaatattttactatttgttttatttggagttaaaataagagtatcatccatatggtccatcctaattcacagaattaaatgagcttaaatagaaaattcagtattttatgataatcacttcgtttttagtttttaaaatttagattattctataatttaccgtgtttgagtattttctcatttttttcataaccatacctgattatactgtgtaacaaatattttctattgcagttttctttccagtacttattagaactcagtatttggaaataatttcagcttaattgaccataagaactgtggccaaaaagaacagttttttggagaggcagatgacattatacctgattttagaaaatctcactttatttttgctaataagtagactaagtgctctgtgttctcagtcttccctttttttctgcccccattcttactttgtcccaggcatgcagagaaagatggtgatattttaggccaggagtataccttgctataacctaagcatgccttctttattccagctcctatgttctgtgtatatcattaacattttcccaaatraacacttaattctcttttccctaggtgccatctcctcaagctacaaaatgtccacatcttatatcccctttgcttctactgctctgattttgtggtaccagtactctctgccactgaacatttwgaaatatttttgttttagatttgcaaaaaatgacatataggtcagtactcacatggatttttaagataaatcacctgtgtgataatattttgaatctgagacgaatacaacttttaaaaattgtttttaaaaatagacttttttttttagagcagttgtaggttaacagaaaaattgagaggaagatagagatttcctttctcccctgacaaagccctcaacagcctcccaggctatcagtatcctgcaccacaatggtacatttgttacaatcaatgaacctactctgaaacatcattatcatccaaagttcatggtttacattagagtcccctcttggtgttatacatgctagaggacaaatatatgatgatatgtatgcatcattataatatagtatagtttcgctgccctaaacatcctctgcaaatgcaactattttaatgggtaccaaagaagtaaatgtatttactggcttttagataataaataacgggctttattgtttattttaaaagctacaatttgttttagctggtttctctgttctattaatgctttgaatttccaaatttaatatatgtagtcatgcatttaacttaatatttaattatttgatttatttaattttctatattcttacaatgtatgtatgatgtataatttaagggaaagctatgacttctcagtttcttagaatcctaggtaaataaaacaataaaaagaaaacccttacatttaaaagagctttcaggtacagaagtattgatacaactaagatcctaaatgttttaattagtgtttacttaagcctttttcaggtgaggaggtactaatgctggttatttccttgaagctttatgtggacctataaataaaaatccaatctcctgctaataggtatgcatattgtgagaaaaacgttaggagctggtagtaaaaaatgagattctatgccaaaataacttctcttcatatttgcctaggcatttcttgacctttacccacttacgcaaggagaaggaaatcataatgatgtcatgtgatcaaaggaaaccatggaagggttcacgctgatagctgatagcttttacagtgctcattcctaacagtggatttacttgtaagctttcagatcaacacaaatagctgcagcctgggttaaaatataacatcactatttggcttttgttttgcatgatttttaaaagcagtactcctagggaaatggcctctgaagtatatcagtttcatctcttaccaagactgttaagaagaaactagtgggattttgaacaagttatataattgtggtctgaaaagaccctaaactgaagttctgtttaaatatagttacatgaatttctctgatactaatgtactcaacagccaggtataaactatatctcctagtaacattttccatttttgtttaatcaaatacttgcttatgaaggatttcagaaatttgtaataaatgtcagcttttgatagcatagcagtaattgacatttcaaaaatatatatttctttctgtgtttggttgggtgtaatgaggaaaatacctgataaaatgtctgaagacactttctaatgttatcttggtgcataagctgtaatttttattcaaaattaaatttcaaatgtttgcagttttggctaaaacattgagttgaaagaattatgaaaagtgggcccatatgaagtaccatgttcattttgaaatatagatttaagatttagaaatatattaaaagagttaatggagcctcctaaattggattttattttgtgggtgaagaattgtaggaagatgaatgtggcctacagttttagtaatctcctagtggagttttttttaacttagtacttttttatttttaagttttttaatctataaaaaatgtgatttctataaaccatgattacaataaataattatattaaaa

SEQ ID NO: 355 - DNA, 822 bp, Homo sapiens
  SITE (39): n equals a,t,g, or c
  SITE (56): n equals a,t,g, or c
  SITE (597): n equals a,t,g, or c
  SITE (762): n equals a,t,g, or c
  SITE (777): n equals a,t,g, or c
  SITE (800): n equals a,t,g, or c
  SITE (810): n equals a,t,g, or c
  SITE (817): n equals a,t,g, or c
tttaaaacatcccaacagtatataatacaaaggctgttntttacgtgaacacacancatggcttgtaatggaatattgtttaggatctgcttcggatttactagaagttcacaaaaagccattacaagaagtggaaatagcagcaattacacatggtgctcttcagggattagcctacttacattctcatactatgattcatagagatatcaaagcaggaaatatccttctgacagaaccaggccaggtgaaacttgctgactttggctctgcttccatggcatcacctgccaattcctttgtgggaacgccgtattggatggccccagaagtaattttagccatggatgaaggacaatatgatggcaaagtagatgtgtggtctcttggaataacatgtattgaactagcggaaaggaagcctcctttatttaatatgaatgcaatgagtgccttatatcacatagcccaaaatgaatcccctacactacagtctaatgaatggtctgattattttcgcaactttgtagattcttgcctccagaaaatccctcaagatcgacctacatcagaggaacttttaaagcacatatttgntcttcgggagcgccctgaaaccgtgttaatagatctcattcagaggacaaaggatgcagtaagagagctggacaatctgcagtatcgaaagatgaagaaactccttttcaggaggcacataaatggaccagcagtagaagcacaggaaggaagaagaggaaccangatcatgggtgttgnccggacaggaacaggtaatagtngttggaaggnaatcaantccat

SEQ ID NO: 356 - DNA, 344 bp, Homo sapiens
ggaccccggtgtctggcttcccccgagccgggaccccgcgatggccaagcgcactcgctgtacatccgcatcgtggaggggaagaaccttcccgccaaggacatcactggcagcagcgacccctactgcatcgtgaaggtggacaatgagcccatcatcaggacagccacagtgtggaagaccctgtgccccttctggggtgaggagtaccaagtgcacctgccgsccaccttccacgctgtggctttctatgtcatggatgaggatgccctcagccgggacgacgttatcggaaaggtctgccttacaagggacaccatagcctctcaccctaagggtttcag

SEQ ID NO: 357 - DNA, 721 bp, Homo sapiens
  SITE (484): n equals a,t,g, or c
  SITE (509): n equals a,t,g, or c
  SITE (542): n equals a,t,g, or c
  SITE (598): n equals a,t,g, or c
  SITE (608): n equals a,t,g, or c
  SITE (703): n equals a,t,g, or c
  SITE (720): n equals a,t,g, or c
ggcggtttgcaatgagatcataaacattgccgaaaaatctgttcattactgcagcactgtttctcatccccttgactttcatcacaaggtatccccttctgacaataaatcatctttaatcatttctcagcaacctcaagcccagcagcgaagagtcacccccgacaggagtcaaacctcacaagatttatttagctatcaagcattatatagctatataccacagaatgatgatgagttggaactccgcgatggagatatcgttgatgtcatggaaaaatgtgacgatggatggtttgttggtacttcaagaaggacaaagcagtttggtacttttccaggcaactatgtaaaacctttgtatctataagaagactgaaaaccatggagattatttttattggaggaggaagcatcattcatgaaccgatctttttagttgagtcagtaggaaaattaatacagtggataaagtaagaagcanaagacagggacagagaaagtgttgngtttaaaacccaagcctggtctaaggttactgngtattaagacagggccgaactagtgtgctgagcaaaaagaattgaagcaaattggnatttacttancccgcttctgggagccaacttcaaccctttccccttcccctttcacttcttggggtaaatcctggacctggaagccataagtcccaaggaaaccnagaaggtttaggccccng

SEQ ID NO: 358 - DNA, 3413 bp, Homo sapiens
aacctgggataaacagacagggaaaggcagcacagccctgcactactgctgcctgaccgacaatgccgagtgcctcaagttgytcctgcgggggaaggcctccatcgagatagcaaacgagtcaggagagactccgctggacattgccaagcgcctcaagcacgagcactgtgaggagytgytgacccaagcctwatytggaagatttaattctcacgttcacgttgaatatgaatggcgactactccacgaagacctggatgaaagtgatgacgacatggatgagaaattgcagcccagtcccaaccggcgggaagaccggcccatcagcttctaccagctgggctccaaccagcttcagtctaacgctgtatctttggccagagatgctgcaaaccttgccaaggagaagcagagggctttcatgcccagcatcttgcagaatgagacttacggagccctcctgagtggcagcccacctcccgcccagcctgcagcccccagcaccaccagcgcccccccgcttcctccackgaatgttggcaaagatcccctgacccccacgccgmscccacccgttgccaagacgcccagcgtaatggaagccttgagccagccgagcaagcctgccccgcctgggatctcacagatcaggcccccacctctgcccccacagccgcccagccgcctcccgcagaagaagcctgcgccgggggctgacaagtccaccccactgaccaacaaaggccaaccgagaggacctgtggatctctctgcaacggaagctctgggtcctctgtccaatgctrtggtcctgcagccccctgcacccatgcctaggaagtcgcaggcaaccaagttgaagcctaagcgggtgaaagcgctctataactgtgtggctgacaaccccgatgarctcaccttctccgagggggatgtgatcatcgtggacggggaggaggaccaggagtggtggattggccacattgatggagatcctggtcgcaaaggcgcattcccggtgtcatttgtgcactttatcgctgactgaattgctactgaacaaaagcattaacagttatgttcctgtttcgttattggtaccaaaactcttgccagataaccagtttcatgaactgtttgtatggcagcccatgttctctaatgccactgctctgttttaaaaactcagaggcaatttttacrtatcagtaattgtttttataatttgtggttttcatgaaacattgctatgcatttattaggaaaaactgaatttcccaacaggtgaactgaaaagttattttaactattatacataatcaagatcctgcctctacggaattagctaaacctaaaaatgtttgcattaatgaataaattcttcctgcattccttggcccagttctggagttggtgacctttatcacaattattattttaggcggccagtgaactgctgcttcagaagtccatagcccagctctgaactttctcgataaaatgccatcagttcacctttaaagacacacattcctttgaaatccacccagtgtttaaaaagcaacttggaaatttacacattagcattgtactttctagccctaatttgtgaggttgcagctatcattatattctgcatgtatgtataacctgttgtgaacaatcatacttaacaaaactactgatggtttatgacaacgtagggtaactacagttcattctgttccaggttatataaaactgcatttcctgaatttggttaaaaactaaggatgatggattgcaaaacagttcttttaaattagtttatatgctttaggtgttttggaatttgccttcttgaacttcctgagtcacacagaaagcaactgtacacagtagaattctgtggcgcagaccatgctgtattaacacatcacttgctgtttcctactgagtgtaccactgccttcccttctagcccaggagaatgtttactcagtttagtgtcttgtatttctataatactccaacaggaatggtagtcacactgtcttgaaattgaatctgtccatctgtttataatcaagaacatatcagaaatatataggtcccaggtaatactcccaaacatcccactttttactgtttcaggccatcatatcattcttaagctacttggggtggtagtagaggattaggttgtctattataaaaccaaaactcattcgtttaatgaacttgactgtcatacctctatttagtaattgcgagggtaagattcatagtaggaatattggaaattttggcactctgagaataaataggcatatgatacccacttggacttttaacaaaagtaaaggaataaatttgcatataggcttggaaagtgaggcagcaatgctgttaactgcatttgttgtgatggtgcatttgattgaagcagcttgtctttattatgcaagactgtgtagagttttttyttttttggcattgtactttttgtttttgttataaaggaagacagaacaaactggaatgttttatgatgttgtatagcaatcgctttttacctttcaaagttccgggtaaaaatgtgttatatctgtagttttttgtttttgtttttttttaaagcactacatctgttttcactaattgttaatttctgtttgaacccttcatttaattttctcatagatttaagtaaacagatgtattttgcacagtgcacttatgtctattttaacaatcctcctgcatctgtattttatagtcagccttttgaccacctggtgccagctatataaggaataaagttgattcatatcaacattagaactccagtcccaaactaatctgtcaggttcactggtacataaatacctaggaaatatttttccagtctacaatttggtgctattgtgcagtaactaatagtactcttaccagaggagaaattatattaacgaccctgctaatatcctttcttagttatttgctccttgcaaattaaaaaagcaactaagagaaagaaaaacattgtagatatctatttatatttaaagtttatgtttcatgaactgcagctgcaggattctggcattttgcatgccattctccatcagatctgggatgatggctcagaacatgtacacagactaagagtaactgtgtgatctgttaaggggtggataacataatatgcagcttaggatgctattttgagatgtatgatattcagttcattcacctgattactttggttgcagcacaactgtatatattgtataaccgaaattgattattttcattgtccttaatgcagtgatttataattagagcatgtttaataagtttactcttcttgttaactagtcatttgactggaaaaaaataaaatacttttaaatggaaaaaaaaaaaaa

SEQ ID NO: 359 - DNA, 429 bp, Homo sapiens
  SITE (36): n equals a,t,g, or c
  SITE (409): n equals a,t,g, or c
ggcacgaggcgcgcctggctgggccctgcggaggangggaaggagcgaaggagcgaaggagcaagcggagcgcmgtcgcccaagccaagccgcgctgccaaccctcccgcccgcccgcgctcctgtccgccgtgtctagcagcggggcccagcatggtcatggcggatggccckwggcacttgcagcgcgggccggtccgggtggggttctacgacatcgagggcacgctgggcaagggcaacttcgctgtggtgaagctggggcggcaccggatcaccaagacggaggtggcaataaaaataatcgataagtctcagctggatgcagtgaaccttgagaaaatctaccgagaagtacaaataatgaaaatgttagaccaccctcacataatcaaactttatcaggtantggagaccaaaagtatgttg

SEQ ID NO: 360 - DNA, 1626 bp, Homo sapiens
  SITE (94): n equals a,t,g, or c
  SITE (1268): n equals a,t,g, or c
  SITE (1274): n equals a,t,g, or c
  SITE (1448): n equals a,t,g, or c
  SITE (1583): n equals a,t,g, or c
  SITE (1604): n equals a,t,g, or c
cccgtttgatttcagagcatttcctgaacattgtatttcatagacttctctgattttttcaaaaatgaggtgagcaatggcaagcagccttgtnctcccaatttggtgcttttccttttggtgtggggtgggcatggggggttgggggtggtgtgggtgtgtttagaaaaaagatgcattcctgaagatctctggtgctgaagggcctcgagttcctttcagagactgtatttgacacactttaggtacacacaaacgaatggtatcacatgcaatattttaatggagcaatgggagaggctctttgaaatggggtttgcatctttttgtaacattttgatttctctggtgccttattcctacttgatgctggcactcacatacccacaagaagctgacacagaagtcagccttaggcgtggggacatatgggtgatgtttgagcatgcaggggccatggggagtttggtgtcagttggtggagaagggactagatggcatctcttagccgaggccaacaggaactgcacaagtccattatagtcaaagttagcaattttgatacgtaaacacaatacttcattcttcctcatctgagctttccttccttcttccttttctatctctaccttctcataaaggtgctgctgctgctgctaaggtgcccggagtccagaatgtccattaatcactcaggcacgagcctggcactgccacgtcagcccccagcatgaccaaacccaggtttctcttgcttggggctgagaactgtcagatttttctcatcaaaaatgttttccaaggaatcagtggattacagtttttctgcattgaaaatgcactttaaaaaataaattaaagctccagactgtttaaaatatacagagggagcaggggaaagttaagcatgtgctagtgtctgaacccagttcagtttatctccagttgaaacgatatacactatattatgtataaatgtatacacacttcctatatgtatccacatatatatagtgtatatattatacatgtataggtgtgtatatgtgcatatatacacacatgcacataacaaaatcagatgctcattacaaatccagatgctcattacaaaaccagatgctacacaaacagcagcagaggaaacaaggttggactcttgcaacagatcacaaaaaataaaaacagctacttgcagtgactttggtcatttctgtatgttcataaagaatggattgtaacaaggaaaaaaaggaacagtgttagtngaaaanggaaaaatgggcgaaaccatcttgatccgatgcgaatsmgtaatgktctatataccatttcatcagtattcwtttagtcatgtgattgattcagttctgctatgaaacattktaacwcgtacccacaactgacaactactcgtgagcsttcattaggagtgacctaactttgcntgcctgctcatgggacgagctccttaggtggagataccggggaatagagaaagatgcacgtctctgcgttgtcgcgtgctttgaggggcggtctttaccttccgtgttggagtcctccctgagtccggcgctggntgcgggacacggcccttctcngtgtcccaggcgctgcctcatt

SEQ ID NO: 361 - DNA, 610 bp, Homo sapiens
  SITE (452): n equals a,t,g, or c
  SITE (483): n equals a,t,g, or c
  SITE (520): n equals a,t,g, or c
  SITE (562): n equals a,t,g, or c
gtgtgaagctattgatatgtggtcactgggctgtgtgatagctgagctgttcctgggatggcctctttatcctggtgcttcagaatatgatcagattcgttatatttcacaaacacaaggcttgccagctgaatatcttctcagtgccggaacaaaaacaaccaggtttttcaacagagatcctaatttggggtacccactgtggaggcttaagacacctgaagaacatgaactggagactggaataaaatcaaaagaagctcggaagtacatttttaattgcttagatgacatggctcaggtgaatatgtctacagacctggagggaacagacatgttggcagagaaggcagaccgaagagaatacattgatctgttaaagaaaatgctcacaattgatgcagataagagaattacccctctaaaaactcttaaccatcagtttgtgacantgactcaccttttggattttccacatagcantcatgttaagtcttggtttcagaacatggagatctgnaagcggagggttcacatgtatgatcagtgagtagatcagagnccttactccatgtgcccaatcagccaattacctgacttagatagtatc

SEQ ID NO: 362 - DNA, 666 bp, Homo sapiens
  SITE (584): n equals a,t,g, or c
  SITE (615): n equals a,t,g, or c
  SITE (663): n equals a,t,g, or c
taaaaaagtgtgtactgtttaatgtactctgttgttacaggaaaacaacagcatggtgttacggttggataactcaggacatcacaaaaatgttaacaacggtgtctacctaaacagtcatttctagtgcaagcagtaataatgatgaaaagttaaaatatattagatacgttatagtacgtattaggcactgaagaaatactgtttggaaagaatgactagagcctgagaaattggtgcatcatattctccaggatatgtacaaaaccaagaaaaagaagactcgagttattttgcgaatgttacccatctcaggcacatgcaaggcttttttagaagatatgaaaaaatatgcagaaacatttttggaaccctggtttaaagctccaaacaaagggacatttcagattgtgtacaaatctcgaaataacagtcatgtgaatagagaagaagttatcagagaattggcaggaatagtgtgcaccctcaattcagaaaataaagtggatctcaccaatccacagtacacagtggtagtagaaatcatccaaagctgtctgttgcctgagtgttgtgaaaggttncatgttgtttaggaaattacatttttccggnggtggttgaggagccctagggttccttcacagtttaacttaaaggccnggg

SEQ ID NO: 363 - DNA, 990 bp, Homo sapiens
  SITE (866): n equals a,t,g, or c
  SITE (914): n equals a,t,g, or c
  SITE (950): n equals a,t,g, or c
  SITE (974): n equals a,t,g, or c
  SITE (985): n equals a,t,g, or c
gggcccaagggggagcgagccggtgctgctgcaggctgaggctgcggcagaggcggcgaggcgcgggcggtgaggacggacagtcaccgacttagtccagttccctgtgatctcaaaacaattgttgcagcaggctyctggcagtctcaagcagttcatcttcttggtgtactggtttcctattgtgattttatcatggaaaatcaattggctaaatcaactgaagaacgaacatttcagtaccaggattctcttccatcactgcctgttccttcacttgaagaatcattaaaaaaataccttgaatcagtgaaaccatttgcaaatcaagaagaatataagaaaactgaagaaatagttcaaaaatttcaaagtgggattggagaaaaattgcaccagaaattgcttgaaagagcaaaaggaaaaagaaattggctggaagagtggtggctgaatgttgcctatctggatgttcgtataccatcacaattgaatgtcaactttgcgggtcctgcagctcattttgaacactactggcctccaaaggaagggactcaattagaaagaggaagtataactctttggcataacttgaactactggcagctattaagaaaagaaaaagtgcctgttcataaagttggaaatactcctctagakatgaatcaattccgaatgctattttctacctgcaaggttccaggaattactagagactccattatgaattattttaggactgagagtgaagggcgttccccaaaccacattgtagtgctgtgtcgaggccgagcttttgtctttgatgtaatacatgaaggatgkttggtcaccccgscagagcttcycagacactgacatatatncacaagaaggggcattagtgaacctgatggacctgggaattgcagcanttaacttagtggaggaaccgaactcgatgggcttangccccgaggaatatctggattggncttggatccanaaaac

SEQ ID NO: 364 - DNA, 770 bp, Homo sapiens
aagatggctttttgacagccagcaacctggagcaggtgaagggctacctcgcatctgcctacccaagcaaatacagcgagatgttcccgcaaatcaaaaactgcagcttggaatcggagctagacacggccgtccagggcactggccctggcatttcatcgtctacacagaggccattaaaaacatggaggtgtcccagctgtggtcggtgctctacttcttcatgctgctgakgctgggcattgggagcatgctggggaacacasggccatcctcacccctctgacagacagcaagatcatctccagccacctgcccaaggaggccatctcaggtctggtgtgccttgtcaactgtgccattggcatggtgttcacgatggaggctgggaactactggtttgacatattcaacgactacgcggccacactgtccctgctgctcatcgtgctggtggagacgattgccgtgtgctacgtgtacgggctgaggagatttgaaagtgaccttaaggccatgaccggccgagctgtgakctggtactggaaggtgatgtgggctggcgtaaccactgctgattgtmagcctctttgtcttctacctgagcgactacatcctcacggggaccctgaagtatcaagcctgggacgcctcccagggccagctcgtgaccaaarattacccggcctatgcactggctgtcatcgggctgcttgtggcctcctccaccatgtgcatccccctggcggccctggggacttttgttcagc

SEQ ID NO: 365 - DNA, 826 bp, Homo sapiens
gagctggtggcctgtccccgmctggtgggggctggggctgctgcgggagagtcctgtcctgatgctccccgygsyccccaaacatcgtcccagaggacagcagccaaagagcctcctggctcagagccgtcagctttcgcrttcctgaacgcctgacccratggcctggccctggagtcttcagcttcagctkctgkctggggcggtctgtgcttcctgagcagcctcaaccgtagctgctacagtctccaggcagcttgacttgagaggacgaccctagggctacctcagtttcccccatctcctctgccagaggctctggctatttggacttgaatccctacgagggatggcaggtggcagggcttcagaaatgtcgatctcagggctctcagggggcagtccctgcctgtcttgcyctcagacatgaggtttcttgtatgaatgcggaagcgactaccaggttccttatttcattttgatctcagctccctccttccccaggaggtcatgagcagcaacaagccactgctcccccgtcccatcggggtgggctaggtgctgaggctgggtttggtgcatgtgggttgagggtgtcttgtccgggctgccttgtgctgtctggcctgaggccatttcaagtctcagatccctacgtgatccttccctggctctcacctgctcctttaggctgtaattgcttcctacacacgaagcctctgattggagcctctggtccatctcagaaaaaccttccaagagcgctggggtttatgctttctgaataaacactactgtttacatgaaaaaaaaaaaaaaaaaaggg

SEQ ID NO: 366 - DNA, 676 bp, Homo sapiens
  SITE (628): n equals a,t,g, or c
tttaagttcttcatggagcagcacgtggagaatgtcatcaaaacctaccagcagaaggttaaccggaggctgcagctggagcaagaaatggccaaagctggactctgtgaagctgagcaggagcagatgcggaagatcctctaccagaaagagtctaattacaacaggttaaagagggccaagatggacaagtctatgtttgtcaagatcaaaaccctggggatcggtgcctttggagaagtgtgccttgcttgtaaggtggacactcacgccctgtacgccatgaagaccctaaggaaaaaggatgtcctgaaccggaatcaggtggcccacgtcaaggccgagagggacatcctggccgaggcagacaatgagtgggtggcaaactctactactccttccaagacaaagacagcctgtactttgtgatggactacatccctggtggggacatgatgagcctgctgatccggatggaggtcttccctgagcacctggcccggktctacatcgcaractgactttggccattgagagtgtccacaagatgggcttcatccaccgagacatcaagcctgataacattttgatagatctggatggtcacattaaactcacagatttcggnctctgcactgggttcaagtggactcacaatttccaatattaccagaaa

SEQ ID NO: 367 - DNA, 1449 bp, Homo sapiens
  SITE (2): n equals a,t,g, or c
  SITE (5): n equals a,t,g, or c
  SITE (12): n equals a,t,g, or c
  SITE (22): n equals a,t,g, or c
  SITE (49): n equals a,t,g, or c
anacngacagtnacggatcggnattcccgggtcgacccacgcgtccggnaaattctatttgaagaataccagtttcaagcagtattaagagtaaatgctggggctctcagtgcacataggtatttccgagataatccttccgaattatgctgtatcattgttgatagtggatattcctttacacatatagttccttattgtagaagtaaaaagaaaaaagaagcaattattcggataaatgtgggaggaaaactcttaaccaatcatctaaaggagatcatatcttacaggcagctacatgttatggatgaaacacatgtgattaatcaagtgaaagaagatgtatgctatgtgtctcaggatttttatagagacatggatattgcaaagttgaaaggagaagaaaatacagtaatgatagactatgtcttgcctgacttcagtacaattaaaaagggcttttgtaagccaagggaagagatggtgttgagtggaaaatacaaatctggggaacaaattcttcgtttggccaatgagagatttgctgttccggaaatactctttaatccttctgatataggcattcaagaaatgggaattccagaagctattgtctattcaattcaaaatctacctgaagaaatgcagccgcatttttttaagaacattgtcttgacaggaggaaattcccttttcccaggatttagggatcgggtttactcagaagttcgatgtcttactccaacagattatgatgtttctgttgtgctgcctgaaaaccctattacttatgcctgggaaggtggaaaattgatatcagagaatgatgattttgaagatatggtggtaacaagagaagattacgaagaaaatggacatagcgtctgtgaagagaaatttgatatttaagcaacatttttgaatgaaagttgtgaccataaggtttaatttcaaagttccttttaaaagaggttaaggaactgtgttaccttttgtcctaagaaaaaggcttgaatttatgtaaatactttgatcgattgctaattttcaaaggcttcttaggtaggttactacagtaaactgtaactcagtccacattttcatttaggagctagactaccataacaatgcttatgctgtttccaagggtaggttatttttcattaaaagaagaatgaatgcattttaagtttaattcttcatagctgaaagcacaaatttaacggcttcactggacagttttccttagaaggtagttttgtgtgactgtgactaaactattttattttaaaatgtcattcttatttatacattctaaagttggaaagactgatcttatatgtgtataatgtttattttgtacctagagtacatttaaaagggtggagactaagctaataaagtttttttggccactaaaaaaaaaaaaaaaaaaaaaaaaaaaaaaaa

SEQ ID NO: 368 - DNA, 725 bp, Homo sapiens
  SITE (677): n equals a,t,g, or c
  SITE (692): n equals a,t,g, or c
  SITE (708): n equals a,t,g, or c
ggccagcttcacgccacccgggatgggagaaagcaggtgtcgcgagagttgggcgcaagacgccttgtagggagtgtaactatggccggcctgcggaacgaaagtgaacaggagccgctcttaggcgacacacctggaagcagagaatgggacattttagagactgaagagcattataagagccgatggagatctattaggattttatatcttactatgtttctcagcagtgtagggttttctgtagtgatgatgtccatatggccatatctccaaaagattgatccgacagctgatacaagttttttgggctgggttattgcttcatatagtcttggccaaatggtagcttcacctatatttggtttatggtctaattatagaccaagaaaagagcctcttattgtctccatcttgatttccgtggcagccaactgcctctatgcatatctccacatcccagcttctcataataaatactacatgctggttgctcgtggattgttgggaattggagcaggtaaggttgtatgtatatgtttggttgtgtcatattcacattcattctgacatttatggctcacttttaactggtctcatccccttttaaactcatatttcacagttcaacatacatgtttctcattgtaaacaaatatttttcttatcatttttgnctttgctcatgatgntctcattacctatagnttctcttctggtctcat

SEQ ID NO: 369 - DNA, 1311 bp, Homo sapiens
  SITE (1299): n equals a,t,g, or c
  SITE (1300): n equals a,t,g, or c
tgaccctatagaaggtacgcctgcaggtaccggtccggaattcccgggtcgacccacgcgtccgctcagttctctgggttgargcatcatcaccctggtggccatgtrgaggatggactggaaaaggcattcagttagaagacctctgcaggagtccaaggaagaaacaggcaaatctgcaggaggcagattgcagccttcttcgctgagtctctgcccagtgtgggagggcagatcattccccctgctggctacttctcccaagtggcagagcacatccgcaaggccggaggggtctttgttgcmgatgagatccaggttggctttggccgggtaggcaagcacttctgggccttccagctccagggaaaagacttcgtccctgacatcgtcaccatgggcaagtccattggcaacggccaccctgttgcctgcgtggccgcaacccagcctgtggcgagggcatttgaagccaccggcgttgagtacttcaacacgtttgggggcagcccagtgtcctgcgctgtggggctggccgtcctgaatgtcttggagaaggagcagctccaggatcatgccaccagtgtaggcagcttcctgatgcagctcctcgggcagcaaaaaatcaaacatcccatcgtcggggatgtcaggggtgttgggctcttcattggtgtggatctgatcaaagatgaggccacaaggacaccagcaactgaagaggctgcctacttggtatcaaggctgaaggagaactacgttttgctgagcactgatggccctgggaggaacatyctgaagtttaagcccccaatgtgcttcagcctggacaatgcacggcaggtggtggcaaagctggatgccattctgactgacatggaagagaaggtgagaagttgtgaaacgctgaggctccagccctaagccagccctgctctgcctaagtgtactccagaagaaactcatctcatccaaatacacgctattgagaaggcgagcctgacctccctcttacagataaagtcagctttcagaggctcagggtgggggggcctgcccgaggccataatgctacccaccccctcctcctaaccactggtctgttggaataacccagatgtctgcatcccctcaagtcagtcaatttcctttctgtccactgggggtggaatggggtagggtgggatactttaaagtgctcctgcttaaataaattagaccagaccagtgtatttctaaagaaaatcctgacatgcacacccattaaaaatagtacattttaaaaaaaaagtgaaattnnaataaaaaaaa

SEQ ID NO: 370 - DNA, 2239 bp, Homo sapiens
  SITE (545): n equals a,t,g, or c
  SITE (1674): n equals a,t,g, or c
  SITE (1676): n equals a,t,g, or c
  SITE (2014): n equals a,t,g, or c
  SITE (2042): n equals a,t,g, or c
  SITE (2165): n equals a,t,g, or c
  SITE (2188): n equals a,t,g, or c
  SITE (2218): n equals a,t,g, or c
gcacaagtgtgcatgtgtggctcggaggcttcagctggggccccgccctcgtccccaggcgcacactgacacacgcagcccagacccggcccgagcgggctcctgccctcggcgtggcttctctccagccgggagtcccagggccagctagcctcctcccctaaaggggacggcctgtcagcgcagtgccagagtccagcaccgggaggaaagtttcggagtgcggagggagttggggccgccggaggagaagagtctccactcctagtttgttctgccgtcgccgcgtcccagggaccccttgtcccgaagcgcacggcagcggggggracttcagccctccaggcggggtgggttccaggtccgggtccgaggcgggcgctggaggctcggccccaggccggagaggaactcctttcgcgagctgtcgccgtgggcccgcattgtctgcaggaactctccggaatcgggagggggaggactggatcgcgcttccactgggattcgtcaagagttccggcggcaactgcggcggtggcggagantccctttgtcctctcaggacctccctctctccctccctgtcagctggtgggtcccgctgccgcagccgggcgtctcagctgctcgccgccccccaccccagagtgcgtgcmgggtgactcccgccacctttgcgaccctcctgagcttaggggactgcgagcgggagggagtctcaggcccccggccgcargatggtggcggacggtccccggcccgcagccccgggagctggctgttccccgggctgtggctgttggtgctcagcggtcccggggggctgctgcgcgcccaggagcagccctcctgcagaagagcctttgatctctacttcgtcctggacaagtctgggagtgtggcaaataamtggattgaaatttataatttcgtacagcaacttgcggagagatttktgagccctgaaatgagattatctttcattgtgttttcttctcaagcaactattattttgccattaactggagacagaggcaaaatcagtaaaggcttggaggatttaaaacgtgttagtccagtaggagagacatatatccatgaaggactaaagctagcgaatgaacaaattcagaaagcaggaggcttgaaaacctycagtatcataattgctctgacagatggcaagttggacggtctggtgccatcatatgcagagaaagaggcaaagatatccaggtcacttggggctagtgtttattgtgttggtgtccttgattttgaacaagcacagcttgaaagaattgctgattccaaggagcaagttttccctgtcaaaggtggatttcaggctcttaaaggaataattaattctatactagctcagtcatgtactgaaatcctagaattgcagccctcaagtgtctgtgtgggggaggaatttcagattgtcttaagtggaagaggattcatgctgggcagtcggaatggcagtgttctctgcacttacactgtaaatgaaacatatacaacgagtgtaaaaccagtaagtgtacagcttaattctatgctttgtcctgcacctatcctgaataaagctggagaaactcttgatgtttcagtgagctttaatggaggaaaatctgtcatttcaggatcattaattgtcacagccananaatgttctaacgggatcgcagccatcattgttattttggtgttactgctactcctggggatcggtttgatgtggtggttttggcccctttgctgcaaagtggytattaaggatcctccaccaccacccccccctgcaccaaaagaggaggaagaagaacctttgcctactaaaaagtggccaactgtggatgcttcctattatggtggtcgaggggttggaggaattaaaagaatggaggttcgttggggtgataaaggatctactgaggaaggtgcaaggctagagaaagccaaaaatgctgtggtgaagattcctgaagaaacagaggaacccatnaaggctaaaacaacttgacccaacccanacaaccaagcttcttagacaaaatggtacacccccaattaagggtcggcttgatgctctctggctttgttgaggcgcagtatgaccgggtttctttgatgcgacctcaggaaggagataaggncggtgcataaacttcttccgagnttcatctcaataaaagggaagcaggaagancaagaagtaccaaaatggcca

SEQ ID NO: 371 - DNA, 459 bp, Homo sapiens
  SITE (416): n equals a,t,g, or c
  SITE (450): n equals a,t,g, or c
  SITE (455): n equals a,t,g, or c
ggcagaggttttttgttccaagagagaagtgaagaatgtagttttcaaccaaagggatgacagctgatgagtgggctgagaaaatgcccaaaggcccgccgcctacctctcccaaggccacagccracagagacatcctggctcgcctccacaaagcagtgacttcccattaccatgccatcacccaggagtttgagaattttgacaccatgaaaacgaacaccatctccagagaggagtttagggccatttgtaatcgccgygtccaaatcctgacggacgaacaktttgacagaytctggaacgrgatgccakcaatgccaaggggargcttgaatacccggayttctgacaaggtcagttccagacagagcacaccaatggcactgggactcggcgggccaaaaggacagtgnctgcgctcgaagacaattgcttatgcatagactnacagnaagc

SEQ ID NO: 372 - DNA, 1595 bp, Homo sapiens
  SITE (433): n equals a,t,g, or c
  SITE (467): n equals a,t,g, or c
tccatgacggtcagtgcagcaatccacaaactactcccggctgccagcatcgcggtaatgacgaactggctcgcgcctgcataaatgatgcaggagaaaaaaacgctttcgagaggagagaatcccagacgggtcgcattcagaccgaacgcaaaggccaccggaatataactaataacaatcggtaaactgtctttgcatccttccatgaaggtcgccgaaccaggagcaggctgtggagtagggctttccatagagtgtacgcttaacgattgttaatattataaatagactgaatgaatatcttaaccttatcagactgatgggcttcttaacacccttataagtgtaaagccacgaaaacggttgctgattgcttaatttgcggcttcctgacgatgaaaacctcgccaccagaccagtaagttaagcngggcratcgtcgctccarmcwgraaacgsgcccnaaccgccatgttgccaggctgaggctgaaattagcgaaccggcggcaccgccaataaagtagctagtcatgtaacctgcggtcaggcgattgcgcgcatcaggatgtatccgataaattaccgtctggttagtgatatgcacgccctgcacggtgagatccagcaccaggattccgataatcaacgccagtacggaagtgtgaccaaaccagatcgccagccatgaaagtaatagcagcagcagaccgaaagttktggtktggtgcgatttgcccttatyggcaaaaccscccsccggacgagcgcccaacgytccggcagytcccgcaagtccaaacagaccaatgacaccatcgctgtagttaaaaggtggagcggcaagcaaaaaggccattgagktccagagaatgctgaaattggcaaagktcaggcagcccagcaacgcgcgggtacgcagaattttatcgctgataaacataytgaaaacggaacccaasaactgtgggtagttgwggtgggtttctgatttcatttgtggcagaccacgccataatgccagcgccatcagtgccattaacaccgaagcaacccaaaagacggtgcgccagccgccgagattcgccagcaatccggcaactgtccgtgccagcaagatccccaacagcagaccgctcataatagtgccaaccactttgccgcgtttatccggtgaagccagcgtcgctgccagcggaaccagaatttgtgccacgactgagaataaaccggttaatgccgtaccgaggatcatcatcgccagcgactgactgctggcggtaatcaacatgccgccagtaaggtcatcgagacaatcaggcggcggcgttcaaacatatcaccgaggggaacaagaaacagtagacctgcggcatagcccaactgcgcggcggtaacaataaagcctgccgaactggcggaaagggaaaagttacgcgcgatggtgtcgagcaatggctgggcgtaatagttactggctaccgccagaccggtggcgatagacatcagcacgatcagcgccgggctaagctcatgattaggtttagtcattatttttgttcatcaggtgatgattaagctggaaatcaattc

SEQ ID NO: 373 - DNA, 1511 bp, Homo sapiens
  SITE (1511): n equals a,t,g, or c
ttggccggctttccccgtcaagctctaaatcgggggctccctttagggttccgatttagtgctttacggcacctcgaccccaaaaaacttgattagggtgatggttcacgtagtgggccatcgccctgatagacggtttttcgccctttgacgttggagtccacgttctttaatagtggactcttgttccaaactggaacaacactcaaccctatctcggtctattcttttgatttataagggattttgccgatttcggcctattggttaaaaaatgagctgatttaacaaaaatttaacgcgaattttaacaaaatattaacgcttacaatttgccattcgccattcaggctgcgcaactgttgggaagggcgatcggtgcgggcctcttcgctattacgccagctggcgaaagggggatgtgctgcaaggcgattaagttgggtaacgccagggttttcccagtcacgacgttgtaaaacgacggccagtgaattgtaatacgactcactatagggcgaattgggtaccgggccccccctcgagtcatcagccatgtgcctgaaaacacaaagggggcagtgaaaaaacacctaaaccaaaagaaaaaagagcaggaactgaccagcaaaatgccagcagttgctttatggtggagttcgtcattttggttgtgtaatgtaaagggtaacacacggcataaaatcggtcaatagcaatggaacagaggtggaaaatggaggtcagtctgagcatcatgtcaaagcttgtgtggaatttacaaaagccatccccaaagtaccagcaactctccactgatcgcattatgctgtatggcataatgacaaaacccagcagaaagtccgtggttgccatggagaggatcagaaagtttgtgggagagtgaagctgtttgaaatgcgatatggaaaccattataaccaagtttccgaatagtgataatcatggctccagtcataaccgaatacattatcacctggacatgaaaagagcggttggtgggaggacaggatttatttacaaattttggacaactggataggtcttcgggaatataagttagatccatggtgctttatcccttgaaatttctttccaggaggatgagtcactcgtgccgaattcctgcagcccgggggatccactagttctagagcggccgccaccgcggtggagctccagcttttgttccctttagtgagggttaatttcgagcttggcgtaatcatggtcatagctgtttcctgtgtgaaattgttatccgctcacaattccacacaacatacgagccggaagcataaagtgtaaagcctgsggtgcctaatgagtgagctaactcacattaattgcgttgcgctcactgcccgctttccagtcgggaaacctgtcgtgccagctgcattaatgaatcggccaacgcgcggggagaggcggkttgcgtattgggcgctcttccgcttcctcgctcactgactcgctgcgctcggccn

SEQ ID NO: 374 - DNA, 466 bp, Homo sapiens
  SITE (450): n equals a,t,g, or c
gcacgagaaaaattgtgtctgtctttcttccttaaacaatacagtataacagtaatttgcatagcatttacattaggcattttgtgtagcattgtattaggtataagtaatctagaaatgatttaaattatacaggaggatgtgcataggttatatgcaaatactaggacatttcatatcaaggacttgagcatctgcatgcagattttggtatccatcagagttcctggaaccaattcaccacagataccaagggacaactgcacagattaaaaccttaatgcattactaccgtgtacccaccataataactaaaatgggaagaaatagaaatgctaggtattggtgacgatatggggccactgggaactcgagtactggtgaatataccccakgaccyagcattccttcccymagtattttccccamcagaagtgtgtagcctttttnaccacaagacctatac

SEQ ID NO: 375 - DNA, 2049 bp, Homo sapiens
gagccacttcaagctctttacctccatggctgatgtcaccattcagttccagtcggaccccgggacctcagtgctgggctaccagcagggcttcgtcatccacttctttgaggtgccccgcaatgacacatgtccggagctgcctgagatccccaatggctggaagagcccatcgcagcctgagctagtgcacggcaccgtggttcacttaccagtgctaccctggctaccaggtagtggggatccagtgtcctcatgtgccagtgggacctaayttgggagtgaggacctgccctcatgccagagggtgacttcctgccamgatcctggagatgtggagcacagccgacgcctcatatccagccccaagtttcccgtgggggccaccgtgcratatatctgtgaccagggttttgtgctgatgggcagctccatyctcacctgccatgatcgccaggctggcagccccaagtggagtgaccgggcccctaaatgtctcctggaacagctcaagccatgccatggtctcagtgcccctgagaatggtgcccgaagtcctgagaagcagctacacccagcaggggccaccatccacttctcgtgtgcccctggctatgtgctgaagggccaggscagcatcaagtgtgtgcctgggcaccctcgcattggagtgaccccccacccatctgtagggctgcctctctggatgggttctacaacagtcgcagcctggatgttgccaaggcacctgctgcctccagcaccctggatgctgcccacattgcagctgccatcttcttgccactggtggcgatggtgttgttggtaggaggtgtatacttctacttctccaggctccagggaaaaagctccctgcagctgccccgcccccgcccccgcccctacaaccgcattaccatagagtcagcgtttgacaatccaacttacgagactggatctctttcctttgcaggagacgagagaatatgaagtctccatctaggtgggggcagtctagggaagtcaactcagacttgcaccacagtccagcagcaaggctccttgcttcctgctgtccctccacctcctgtatataccacctaggaggagatgccaccaagccctcaagaagttgtgcccttccccgcctgcgatgcccaccatggcctattttcttggtgtcattgcccacttggggcccttcattgggcccatgtcagggggcatctacctgtgggaagaacatagctggagcacaagcatcaacagccagcatcctgagcctcctcatgccctggaccagcctgggaacacactagcagagcaggagtacctttcttccacatgaccaccatcccgccctggcatggcaacctgcagcaggattaacttgaccatggtgggaactgcaccagggtactcctcacagcgccatcaccaatggccaaaaytcctctcaacggtgacctctgggtagtcctggcatgccaacatcagcctcttgggaggtctytagttctctaaagttctggacagttctgcctcctgccctgtcccagtggaggcagtaattctaggagrtcctwaggggttcaggggraccctacccccacctcaggttgggcttccctgggcactcatgctccamaccaaagcaggacacgccattttccactgaccaccctataccctgaggaaagggagactttcctccgatgtttatttagctgttgcaaacatcttcaccctaatagtccctcctccaattccagccacttgtcaggctctcctcttgaccactgtgttatgggataaggggagggggtgggcatattctggagaggagcagargtccaaggacccaggaatttggcatggaacaggtggtaggagagccccagggagacgcccaggagctggctgaaagccactttgtacatgtaatgtattatatggggtctgggctccagccagagaacaatcttttatttctgttgtttccttattaaaatggtgtttttggaaaaaaaaaaraaaaaaaaaaaaaat

SEQ ID NO: 376 - DNA, 430 bp, Homo sapiens
  SITE (286): n equals a,t,g, or c
  SITE (342): n equals a,t,g, or c
  SITE (347): n equals a,t,g, or c
  SITE (371): n equals a,t,g, or c
ctgagagatatccaaaagaactaaatgccatcatggaaagcatgttgaacaagaatccttcattaagaccatctgctatcgaaattttaaaaatcccttaccttgatgagcagctacagaacctaatgtgtagatattcagaaatgactctggaagmcaaaaatttggattgtcagaaggaggctgctcatataattaatgccatgcaaaaaaggatccacctgcagactctgagggcactgtcagaagtacagaaaatgacgccaagagaaaggatgcggctgangaagctccaggccggctgatgagaaagccaggaagctgaaaaagattgtggaaganaaatntgaagaaaatagcaaacgaatgcnagaattgagatctcggaactttcagcagctgagtggtgaatgtacttcatgaaaaacac

SEQ ID NO: 377 - DNA, 629 bp, Homo sapiens
  SITE (24): n equals a,t,g, or c
  SITE (64): n equals a,t,g, or c
ggggccctgcttactctacccagntgagtgacccgtagtccagcagcagcctaccccagtgacnccgaaaaaataccctcttcggcagactcgttcatctggttcagaaactgagcaagtggttgatttttcagatagagaaactaaaaatacagctgatcatgatgagtcaccgcctcgaactccaactggaaatgcgccttcttctgagtctgacatagacatctccagccccaatgtatctcacgatgagagcattgccaaggacatgtccctgaaggactcaggcagtgatctctctcatcgccccaagcgccgtcgcttccatgaaagctacaacttcaatatgaagtgtcctacaccaggctgtaactctctaggacaccttacaggaaaacatgagagacatttctccatctcaggatgcccactgtatcataacctctcagctgacgaatgcaaggtgagagcacagarccgggataagcagatagaagaaaggatgctgtcttcacaggcaagatgacaacaacaggcatgcaaccaggcaccaggcaccaacggagaggcagctttcgattataagggaaaagttggcttgaacttcagggaagaaaagaaattcttgg

SEQ ID NO: 378 - DNA, 333 bp, Homo sapiens
  SITE (291): n equals a,t,g, or c
  SITE (309): n equals a,t,g, or c
  SITE (331): n equals a,t,g, or c
gaggggagaccttgattataagggcttggctaaggagtttggattttcttctttatagaagtttgaaaagagtcttcgctagttttaacaatgttcatgactgctgattgacagctcttatctgcagtctgcaattctcagaatgaagacattttgagacaaataacagccgcttgctcgtctcactgtttactcctcttgtaagagcactgtatgatgcacatcacacattgagttggatgtgtgatgatgcatcagactgctgccaaaaaaaaaaaaaaaaaaaaaaanccccggggggggcccggnacccaattccccccaaaggggngc

SEQ ID NO: 379 - DNA, 429 bp, Homo sapiens
ctgcaatgcgccctccccggcagcgacatcagcaattcctattggtgcgcatattgtcagcaaggtacaaacgctgttggcaagccagagtaaccccggacgcacgctgcgagcggcacgtagtgtggatgccttacacgccgcatttaatcaataacctttgaaaacaggatgtagcgatgaaacttaacgacagtaacttattccgccagcaggcgttgattaacggggaatggctggacgccaacaatggtgaagccatcgacgtcaccaatccggcgaacggcgacaagctgggtagcgtgccgaaaatgggcgcggatgaaaccgmgccgctatcgacgccgccaaccgcgccctgcccgcctggggcgcgctcaccgccaaagaacgcgccaacattctgcgcaactggttcaatttgatgat

SEQ ID NO: 380 - DNA, 208 bp, Homo sapiens
  SITE (150): n equals a,t,g, or c
  SITE (164): n equals a,t,g, or c
gaagacctgggataacggcaaacccattcgcgaaaccagtgctgcggatgtaccctggcgattgaccatttccgctatttcgcctcgtgtattcgggcgcaggaaggtgggatcagtgaagttgatagcgaaaccgtggcctatcatttncatgaaccgttagncgtggtggggcagattatcccgtggaacttcccgctgctgatgg

SEQ ID NO: 381 - DNA, 1542 bp, Homo sapiens
tagtggaggcccactattggatcgtaaaggcccacgcctgatgctgggactggggatgttcttctggtcactgttccaggcaatgtctggcatggtgcacaactttacgcagttcgtgttggtgcgtatcggtatggggattggtgaagcgccgatgaacccatgcggtgtaaaagtcattaacgactggttcaacatcaaagagcgcggacgcccgatgggcttcttcaacgcagcttctaccattggcgttgccgtaagcccaccgattctggcggcgatgatgctggtgatgggctggcgcgggatgtttattaccattggtgtactggggatttttctcgccatcggctggtatatgctctatcgcaaccgcgagcacgtagaactgactgccgttgagcaagcttatctcaatgcaggtagcgtcaatgcccgccgagatccgctcagttttgccgaatggcgcagcctgttccgtaaccgtacaatgtggggaatgatgctcggattcagtggcatcaactacactgcgtggctgtatctggcctggcttcctggttacctgcaaacagcctataacctggatttaaaaagcacagggttgatggcggctatccctttcctgtttggggctgccgggatgctggtcaacggttacgttaccgactggctggtcaaagggggaatggctccgattaaaagccgtaagatctgcattattgccgggatgttctgttctgccgcctttacgctgatagtaccacaagcgacaacatccatgacggcggttctgctgattggcatggcactgttctgtattcactttgccggaacatcctgctggggcttgatccacgtcgcagttgcttctcgcatgactgcgtcggtgggcagtatccagaactttgccagcttcatctgcgcctcttttgcgccgatcattactggttttattgttgataccacccactcattccgtctggcactaatcatctgcggttgcgtcaccgcagcgggggcactggcgtacatcttcctggttcgtcagccgatcaacgacccacgtaaagattaatctccttatgcccgataacattttgcttatcgggcattttcatggcgattaaaatgtttcccagttctcctcgctatctgccacggccattttacgcggcgcagctggcgtcacggtttttaccacagccgatgtttcacgctgctgttgctgaatccggaacactgccactgcttcggtcaggcgactggcctgctcttccagcgcggcggcggcagcggcagactcttccaccagcgcggcgttctgttgagttacccggtccatctcagcaaccgctaagccaacctgatcgataccacggctctgctcatcagaagcagaagcaatttcgcccataatgtccgtcacgcgggtcacggcgctgacaatctccgccattgtttccccggcgctttcgaccagcgtagagccaacatccactttccccaccgagtcttcaatcaggcttccaatgtgccaat

SEQ ID NO: 382 - DNA, 1597 bp, Homo sapiens
  SITE (10): n equals a,t,g, or c
gcgcgtgcgntgagcaagggcgcggttttgcgrtggtcgcgggagwagtgcgtaatstggcccagcgcagcgcccaggcggctagtgaaattaaaagcctgattgaagactcggtggggaaagtggatgttggctctacgctggtcgaaagcgccggggaaacaatggcggagattgtcagcgccgtgacccgcgtgacggacattatgggcgaaattgcttctgcttctgatgagcagagccgtggtatcgatcaggttggcttagcggttgctgagatggaccgggtaactcaacagaacgccgcgctggtggaagagtctgccgctgccgccgccgcgctggaagagcaggccagtcgcctgaccgaagcagtggcagtgttccggattcagcaacagcagcgtgaaacatcggctgtggtaaaaaccgtgacgccagctgcgccgcgtaaaatggccgtggcagatagcgaggagaactgggaaacattttaatcgccatgaaaatgcccgataagcaaaatgttatcgggcataaggagattaatctttacgtgggtcgttgatcggctgacgaaccaggaagatgtacgccagtgcccccgctgcggtgacgcaaccgcagatgattagtgccagacggaatgagtgggtggtatcaacaataaaaccagtaatgatcggcgcaaaagaggcgcagatgaagctggcaaagttctggatactgcccaccgacgcagtcatgcgagaagcaactgcgacgtggatcaagccccagcaggatgttccggcaaagtgaatacagaacagtgccatgccaatcagcagaaccgccgtcatggatgttgtcgcttgtggtactatcagcgtaaaggcggcagaacagaacatcccggcaataatgcagatcttacggcttttaatcggagccattccccctttgaccagccagtcggtaacgtaaccgttgaccagcatcccggcagccccaaacaggaaagggatagccgccatcaaccctgtgctttttaaatccaggttataggctgtttgcaggtaaccaggaagccaggccagatacagccacgcagtgtagttgatgccactgaatccgagcatcattccccacattgtacggttacggaacaggctgcgccattcggcaaaactgagcggatctcggcgggcattgacgctacctgcattgagataagcttgctcaacggcagtcagttctacgtgctcgcggttgcgatagagcatataccagccgatggcgagaaaaatccccagtacaccaatggtaataaacatcccgcgccagcccatcaccagcatcatcgccgccagaatcggtgggcttacggcaacgccaatggtagaagctgcgttgaagaagcccatcgggcgtccgcgctctttgatgttgaaccagtcgttaatgacttttacaccgcatgggttcatcggcgcttcaccaatccccataccgatacgcaccaacacgaactgcgtaaagttgtgcaccatgccagacattgcctggaacagtgaccagaagaacatccccagtcccagcatcaggcgtgggcctt

SEQ ID NO: 383 - DNA, 513 bp, Homo sapiens
  SITE (489): n equals a,t,g, or c
  SITE (499): n equals a,t,g, or c
agcattaactagtgaggagcgaactcgatgggctaaggcacgagaatatctgattggtcttgatccagagaacttggctttgttagaaaaaattcagagtagtttactggtatattccatggaggatagcagtccacatgtaacaccagaggattattctgagattattgcagccatccttattggagatccaacagtacgctggggtgacaaatcctataacttgatttccttttctaatggagtatttggctgtaattgtgatcatgctccttttgatgcaatgattatggtgaacatcagttattatgtggatgagaaaatttttcagaatgaaggaagatggaagggttcagagaaggtacgagatataccacttccagaagagctcattttcattgtggatgagaaagttttaaatgacatcaaccaagctaaagcccagtatctcagggaggtatatttttcacttttctcttaaataataangattttttcntttaacaatcatat

SEQ ID NO: 384 - DNA, 322 bp, Homo sapiens
  SITE (297): n equals a,t,g, or c
  SITE (319): n equals a,t,g, or c
aattccgaagtttaaaatcggaggaaaagaagtttttagaagtaagataatacacaagaacctcaaccctgtgtgggaagaaaaagcttgtattctggttgatcatcttagggagccattgtatataaaggtatttgactatgattttggactacaggatgactttatgggstcagcctttctggatctgacacaattggagttaaacaggcccaywgatgtgacccttactctgaaagatcctcattatcctggaccatggatcttggaatccattttgctctcagtgcatccttnacccctgaaagraaggagagtncca

SEQ ID NO: 385 - DNA, 359 bp, Homo sapiens
  SITE (337): n equals a,t,g, or c
  SITE (348): n equals a,t,g, or c
ggacaaccgcggcgcggctcggcgctcccggcctggcgttgtggcgccgcagcccttgccaccttccctgcacctgccctgcccggcctcatgtaccgcgcgctgtacgcgttccgctcggcggagccawacgcgctggcgttcgccgcgggcgagaccttcctggtgctagagcgamgagcgcgcactggtggctggccgcgcgggcgcagtggtgagacgggctacgtgccgccagcctacctgcgccgcctgcargtctaactgctgtccctgcccccccaagggctggagcaggatgtcttcaagccattgaccgggcaatcgaggtgtaaanaaaaaaccatncgggatgttgg

SEQ ID NO: 386 - DNA, 231 bp, Homo sapiens
taggtgatggaaggaagtgggtctgggcggtgggaaggttcttgtccaccgctgggcacttgttctttcccgcagtgaccccytctgactgctacgtgactytctggctgcccacggcctgcagccacaggctccagacacgcacggtcaagaacagcagtagccctgtctggaaccagagctttcacttcaggatccacaggcagctcaaggtgggccaggcatcagcgc

SEQ ID NO: 387 - DNA, 476 bp, Homo sapiens
  SITE (59): n equals a,t,g, or c
gcgcctgcaggtcgacactagtggatccaaagaattcggcacagtggttacggtcctgngaaagaaaactcctgcattcctcccctttaattgggtttattgttaaagcactggagcagctaatgctcacagacctgtaggagctggagtgggagctcaagcaggattcttcccgagtccctggcatcctcagaagcttcaactctggaggcaatgggtcgaaaggaagaagatgactgcagttcctggaagaaacagaccaccaacatccggaaaaccttcatttttatggaagtgctgggatcaggagctttctcagaagttttcctggtgaagcaaagactgactgggaagctctttgctctgaagtgcatcaagaagtcacctgccttccgggacagcagcctggagaatgagawttgctgtgttgaaaaagtttcaagcatgaaaacattgtgaaccctgggaggacatct

SEQ ID NO: 388 - DNA, 434 bp, Homo sapiens
caggggtccamaragactacatccgccacctccatgacagccaacacgtggctkyyttccaccggggccgattcttccgcatggggacccactcccgaaacagcctgctttccccgagagccctggagcagcagtttcagagaatcctggatgatccctcaccggcctgcccccacgaggaacatctggcagctctgacagctgctcccaggggcacgtgggcccaggtgcggacatccctgaagacccaggcagcggaggccctggaggcggtggaaggggccgctttctttgtgtcactggatgctgagcccgcggggctcaccagggargacccggcagcgtcsttggatgcctacgcccatgctctgctggycggccggggccatgatcgctggtttgacaaatccttcaccctwatcgtcttctctaac

SEQ ID NO: 389 - DNA, 482 bp, Homo sapiens; identical to SEQ ID NO: 72
  SITE (92): n equals a,t,g, or c
  SITE (100): n equals a,t,g, or c

SEQ ID NO: 390 - DNA, 482 bp, Homo sapiens
  SITE (472): n equals a,t,g, or c
  SITE (478): n equals a,t,g, or c
  SITE (481): n equals a,t,g, or c
agaaattcatagatactcaaacctcacagagtcgttcctccaaagatgccgtgggtcaratatctgttcatgtggacatcactgccaccccaggaacgggagatcataaagtcactgtaaaagtgattgctattaatgacctaaactggcagaccacagcaatgttccgcccctttgtggaagtttgtatactgggacccaaccttggagacaagaagagaaaacaaggcacaaaaacaaaaagcaacacatggtcaccaaagtacaatgaaacatttcagttcattytcggaaaggaaaatcggccaggggyttatgaacttcatctctcagttaaggrttactgctttgccagagaagatcgaattatcggaatgacagtcattcagctacagaacatagcagaaaagggaagctatggggcatggtattcttctgaaaaatatctctatggattgaaactggtttggantatccntana

SEQ ID NO: 391 - DNA, 631 bp, Homo sapiens
  SITE (568): n equals a,t,g, or c
  SITE (579): n equals a,t,g, or c
  SITE (582): n equals a,t,g, or c
  SITE (624): n equals a,t,g, or c
cgaacttctctcccagggcggtgcgacccggagctccagcgcccgagtctccacttcgtttgctgaaacttgctttctaccagctaagaaccatgctgcgagtgattgtggaatctgccagcaatatccctaaaacgaaatttggcaagccggatcctattgtttctgtcatttttaaggatgagaaaaagaaaacaaagaaagttgataatgaattgaaccctgtctggaatgagattttggagtttgacttgaggggtataccactggacttttcatcttcccttgggattattgtgaaagattttgagacaattggacaaaataaattaattggcacggcgactgtagccctgaaggacctgactggtgaccagagcagatccctgccgtacaagctgatctccctgctaaatgaaaaagggcaagatactggggccaccattgacttggtgatcggctatgatccgccttctgctccacatccaaatgacctgagcgggcccagcgtgccaggcatgggaggagatggggaagaagatgaaagtgatgaagacaggttggacangcattcagggnccngggccaaggggcagtttggggacgtgtccgaagtccacttgntcggagg

SEQ ID NO: 392 - DNA, 455 bp, Homo sapiens
  SITE (247): n equals a,t,g, or c
  SITE (448): n equals a,t,g, or c
caaagccccccgaaaagggcaaaggttggagcaaaacgtcccactcactggaggcacctgaggacgacgggggctggtcaagtgcagaggagcagattaactcgtccgacgcagaggaggacggcgggttgggccccaagaagctggttccaggtaaatacacggtcgtggcggaccacgagaagggaggccccgatgcgctgcgctgaggagcggggacgtggtggagctggtgcaggagggcgangagggcctctggtaagaccccgcgctcagccccggactgccccgcacgtggctgccgctgaccctcgccccttgcagtacgtcagggacccgaccamtggcaargagggctgggtgccggccagcagcctgtccgtmcggmtcggcccgtccggctcggcccagtgcttgagcagctcagattcgagcccggggtcggccntgctgag

SEQ ID NO: 393 - DNA, 639 bp, Homo sapiens
gtgatcacctacatgctgctgagcggcctctcccccttcctgggagatgatgacacagagaccctaaacaacgttctatctggcaactggtactttgatgaagagacctttgaggccgtatcagacgaggccaaagactttgtctccaacctcatcgtcaaggaccagagggcccggatgaacgctgcccagtgtctcgcccatccctggctcaacaacctggcggagaaagccaaacgctgtaaccgacgccttaagtcccagatcttgcttaagaaatacctcatgaagaggcgctggaagaaaaacttcattgctgtcagcgctgccaaccgcttcaagaagatcagcagctcgggggcactgatggctctgggggtctgagccctgggcgcagctgaagcctggacgcagccacacagtggccggggctgaagccacacagcccagaaggccagaaaaggcagccagatccccagggcagcctcgttaggacaaggctgtgccaggctgggaagctcggggctccccacgcccccatgcartgamcgcttccccgatgtgagccgctcggartktggcctggatcatcctgctagcactccccagacagggctccagcctgtcggccacacccca

SEQ ID NO: 394 - DNA, 319 bp, Homo sapiens
gaaggatctgggtgtcttgggatcctttattcacagggaggagtacagcttagatctcattccattcgatggggatctcttatccatggaatcagagggtgcattcaaagagtgctacctggagggtgaccagacgagcctgtaccacgcagccaaggggctgatgaccctgcaagctctgtatggaacgatcccccagatctttgggaaaggagaatgcgctcggcaagtggccaatatgatgatcaggatgaaagagagagtttacaggaaagcccagaattccaatatttccctgttttttgataatcctcctttt

SEQ ID NO: 395 - DNA, 667 bp, Homo sapiens
  SITE (655): n equals a,t,g, or c
attcggcacgaagattttgcacagagacctgaaaccacagaaccttctgatcagtgacacgggggagttaaagctggcagatttcggtcttgcaagagcaaaatccgtccctagccacacatactccaacgaatggttaccttgtggtacagacctccagatgtccttctaggctcaacagaatattccacctgccttgacatgtggggagtaggttgcatctttgttgaaatgatccaaggagttgctgcttttccaggaatgaaagacattcaggatcaacttgaacgaatatttctggttcttggaacaccaaatgaggacacatggcctggagttcattctttaccacattttaagccagaacgctttaccctgtacagctctaaaaaccttagacaagcatggaataagctcagctatgtgaaccatgcagaggacctggcctccaagctcctacaatgttccccaaagaacagactgtcggcacaggctgccttgagccacgagtattttagtgacctgccgccacggctatgggaactcaccgacatgtcttctatttttactgtcccaaatgtgagattgcaaccagaagctggagaaagcatgcggggcttttgggaaaaacaatagttatgggaaaagttttttnaaacaggaagga

SEQ ID NO: 396 - DNA, 380 bp, Homo sapiens
  SITE (13): n equals a,t,g, or c
  SITE (86): n equals a,t,g, or c
cacgagggaacanccgttcgtaatggggacgctggtcgcctcgttgctaacgatggggatttcgaccgtggtgattggtctgctgnccgggctatgccacgattggtattttcgccccgctgctgtggcgctggctcgatttggtcagggtctgggcttaggcggtgaatggggcggcgcggcgctgctggcgactgaaaacgccccaccgsgcaaacgtgcactgtatggctcctttccgcagctgggcgcaccgcatatgccggtgatgcgtgatctgataaagcaacatcgttctcccatggagctgataacaattctgcggtgacttgcgcttaacgggctgcccctgatgcaaatccgcttccccgcggcagcca

SEQ ID NO: 397 - DNA, 628 bp, Homo sapiens
  SITE (8): n equals a,t,g, or c
  SITE (13): n equals a,t,g, or c
  SITE (19): n equals a,t,g, or c
tggcaagntagcnaagagntgaggttcagccagtcagctttcaggaggagtgtgactgcggaggccagggccatcacttgtgccttccgccctggctgagagctgggaagaggggtgccatcgggcctggtcccgggccgtctttctgaggccagggctgtgagaattcacaggtgaatcgctcttctcaagacatcagaatccaaggctgcagccttgctgacgtgcgacacgtcatgcttgcaggctaatttttcttagctcatcacttccccactctatctcgccccagcttgatccaatccctcgttccctaggtgtgtttgtcaaagtgtctctgatgaaccacaacaagtttgtcaagtgcaagaagacttcagctgtgctgggctccatcaaccctgtgtacaatgagaccttcagcttcaaggccgatgccaccragctggataycgctagcctcagcctgaccgcggtgcagaacatggaaggggacagtaaggccacaccctaccctgggctgctgggatggggaccacgaggggctgccgagtgttcaggcagagtgagtgcctcctgtcctgacctcagaaggagctgtacgagctccctccctggttaaggaaaa

SEQ ID NO: 398 - DNA, 446 bp, Homo sapiens
  SITE (86): n equals a,t,g, or c
  SITE (219): n equals a,t,g, or c
  SITE (417): n equals a,t,g, or c
cacgtggtatttcgctatcaggcagggcgtgaggatgagctgacaatcacggagggtgagtggctggaggtcatagaggagggagntgctgacgaatgggtcaaggctcggaaccagcacggcgaggtaggctttgtccctrascratatctcaacttcccggacctctccctcccaragagcagccaagacagtgacaatccctgcgggcagagcacnagcattcctggcacaggccctgtacagctacaccggacagagtgcagaggagctgagcttccctgagggggcactcatccgtctgctgccccgggcccaaagatggagtagatgacggcttctggaggggagaattttggggccgtgttggggtcttcccctccctgcttggttggaagaactgctttggccccccanggaaacttgaactctctggaccctgaaca

SEQ ID NO: 399 - DNA, 688 bp, Homo sapiens
  SITE (306): n equals a,t,g, or c
acccacgcgtccggaagaactctgggaactacgggggcaccactatctgcaccaggaatccctaaagccagccccagtactggtagagaagcctctgccagagtggccagtgcctcagttcatcaacctctttctaccagagtttcccattaggcccattagggggcagcagcagctgaagattttaggcctcgtggctaaaggctcctttggaactgtcctcaaggtgctagattgcacccagaaagctgtatttgcagtgaaggtggtgcccaaggtaaaggtcctacagagggataccgtgangcagtgcaaagaggaggttagcatccarcgacagatcaaccatccctttgtacacagcttgggggacarctkgcagggaaaacggcaccttttcattatgtgtagctactgcagcacagatctgtactccctttggtcggctgttggctgctttcctgaggcttccatccgtctctttgctgccgagttggtgctggtactgtgttatctccatgacttgggcatcatgcatcgagatgtgaagatggagaatattcttctagatgaacgagatacagaaattagctgggtcatgagggcacacactgtgggtcccagctacttcggggaggctgagggggggaagaatttgctttggacccgggagattgggaaggttgca

SEQ ID NO: 400 - DNA, 415 bp, Homo sapiens; identical to SEQ ID NO: 84
  SITE (352): n equals a,t,g, or c
  SITE (385): n equals a,t,g, or c

SEQ ID NO: 401 - DNA, 823 bp, Homo sapiens
  SITE (86): n equals a,t,g, or c
  SITE (682): n equals a,t,g, or c
  SITE (748): n equals a,t,g, or c
  SITE (806): n equals a,t,g, or c
  SITE (814): n equals a,t,g, or c
gcgcctcctgcccgatccgcgctgaccctgcgcgggacgcagccccaggcggctgcctagccgaggcgggagcccgagctgagtcnagctcgccggagcggctgtgctggatgccctggaggaacaaggaggcctccagtccctcttctgctaatccccccttggaagccctccagagccccagcttcagaggcaacatggcggacaagctgaaggaccccagcaccctgggcttcctggaggcgggccgtgaagatcagccacacgtccccagatatcccagctgaggtgcagatgtcggtcaaggagcacatcatgcgtcacacccggctgcagcggcaaactacagagccagcgtcatccaccaggcacacgtccttcaagcgccacctgccaaggcagatgcatgtctccagtgtagactatggcaatgagcttccaccagcagcagagcagcccaccagcattggccgcatcaagcctgagctctacaagcagaagtcggtggatggggaggatgccaagtctgaggccaccaagagctgcgggaagatcaacttcagcctacgctacgattacgagaccgagaccctgattgtgcgtatcctgaaggcttttgacctccctgccaaggacttttgtgggaagctctkgacccttatgttcaagatcttacctcctngcctggaccggcaaatggcaagsttgcaggacccgggttgcamcgcaaggaccctgraaccccacntttkgatggaggaatttccatttccttgtggccttttgagggagttgggttgaaccgnaagttgcntttcagtgt

SEQ ID NO: 402 - DNA, 424 bp, Homo sapiens
  SITE (131): n equals a,t,g, or c
  SITE (362): n equals a,t,g, or c
  SITE (389): n equals a,t,g, or c
catgccttgccctgtcctgctgggccctgccctggacctgggctggagaaggatggaactcttgcaccggagcagcgagagaaccctgagctacgccaaggcgcggcaggagccggaaagagcagagcctncaaaagctttatcaaaaccgggagaagtccgaggagcaactgaccctgaagcaagaggaagccttccgcagctactttgagatcttcaatggtcctggtgaggtggatgcacagagcctgaagaatatcctgctcctaatgggcttctctgtgacgstggcccaggtggaggacgccctgatgagtgctgatgtcaatggagatggtcgtgtggacttcaaagacttcttngctgtgatgacagacaccaggcgcttnttctgctctgtggaacagaacgccctgtcggacat

SEQ ID NO: 403 - DNA, 806 bp, Homo sapiens
  SITE (123): n equals a,t,g, or c
  SITE (127): n equals a,t,g, or c
aattcggcacgagcagagactcttcagtacattctggacaggtacccaaaggacattcaggaaatgctggttcagaacgttttcctcactggcggcaacacgatgtatcctggcatgaaagcnagantggagaaggaactgttggagatgagacccttccggtcttcttttcaggttcaacttgcctcgaaccctgtgctggatgcctggtacggtgctcgtgactgggccttgaaccacctagatgataatgaagtttggatcaccaggaaagagtatgaagaaaagggaggagagtacctcaaggagcactgtgcttccaacatctatgtccccatccgcctgccgaagcaggcctcccgctcctcagatgcccaggcatccagcaagggctccgctgctggtggaggtggtgctggtgagcaggcatagcagaggccctccagagagactgccctgcacgccatgccttgggcacgttggcagtgtgacaggactgtgattgtgctagatgtacctgcccaagtctgctggtcacatttggcagcaaaatggatttctcctggggagaacaaagttaagggacactgagacctgcccttcagaattcggttcacttgggggcttctgtggtagagactaactggccttctgatgtctttgttcaactgtggccagctgtggcatcagcttcctggagcagtaaatgaagacagagtggaggacacaaatgtacaaaatgcacaagactgatttcttaccacattttagtctttcttgttttaaaaaaaattctttaaaattta

SEQ ID NO: 404 - DNA, 568 bp, Homo sapiens
  SITE (481): n equals a,t,g, or c
  SITE (536): n equals a,t,g, or c
  SITE (556): n equals a,t,g, or c
  SITE (562): n equals a,t,g, or c
actgatttgtccctggggcggcacgcggacccgcccggagatgaggcgtcgattagcaaggtaaaagtaacagaaccatggctcagtttccaacaccttttggtggcagcctggatatctgggccataactgtagaggaaagagcgacatgatcagcagttccatagtttaaagccaatatctggattcattactggtgatcaagctagaaactttttttttcaatctgggttacctcaacctgttttagcacagatatgggcactagctgacatgaataatgatggaagaatggatcaagtggagttttccatagctatgaaacttatcaaactgaagctacaaggatatcagctaccctctgcacttccccctgtcatgaaacagcaaccagttgctatttctagcgcaccagcattggtatggggaggtatcgccagcaagccaccgcttacagctgttgctccagtgccaatggggnccattccagttgttgggaatgtctccaaccctagtatcttctgttcccacagcantgtgccccccctggctaaanggggtncccctg

SEQ ID NO: 405 - DNA, 470 bp, Homo sapiens
  SITE (415): n equals a,t,g, or c
  SITE (419): n equals a,t,g, or c
  SITE (443): n equals a,t,g, or c
  SITE (451): n equals a,t,g, or c
ttcattgacatagggcattatgtacgtgatatcagtgcttatgaagaattggtatccaagctgaatttattagtggaggatgaactgaagcaaattgctgaaaatattgaaagcattaatcagaacaaagctccttygaaatatataggcaactatgcaattttggatcatcttggaagtggagcttttggctgtgtttacaaggttagaaagcatagtggtcaaaatcttttagcaatgaaagaggtcaatttacataacccagcatttggaaaggataagaaagatcgagacagcagcgtaagggaatattgtttctgaattaacaataattaaagagcagctttatcatccccacattgtacgttattacaaaacatttctggaaaacgataggttgttcatagttatggancttnataaaaggagccccgcttggagancatttcantcctttgaaggaaaacatc

SEQ ID NO: 406 - DNA, 665 bp, Homo sapiens
  SITE (648): n equals a,t,g, or c
ggggaggcctggcagggtgtatccgaggaagccaaggagctggtccgagggctcctgaccgtggaccccgccaagcggctgaagctcgagggactgcggggcagctcgtggctgcaggacggcagcgcgcgctcctcgcccccgctccggacgcccgacgtgctcgagtcctctgggcccgcagtgcgctcgggtctcaacgccaccttcatggcattcaaccggggcaagcgggagggcttcttcctgaagagcgtggagaatgcacccctggccaagcggcggaagcagaagctgcggaggccaccgcctcccgccggggctcccctgcaccagccaacccgggccgagcccccgtcgcctccaaaggggccccccgccgagccaacggccccctgcccccctcctaatccccaccactgtgacccccttccctcataggggctgtgacctgggagcccggctcactcccggaggcctctgcctgcggctgacctgatccccaagggactgtcctttcctctcctaccccaccccactcccagacagagcagaagtatttttataagcagagaattttttatgtcttaccagatagagttgcagggaagggggggcctgctggggagtggggtttgggggkccctnttccmaggacactgcct

SEQ ID NO: 407 - DNA, 536 bp, Homo sapiens
  SITE (491): n equals a,t,g, or c
aattcggcacgagtcccggtggtgagggcagtggagcacccagcaggccgccaacatgctctgtctgtgcctgtacgtgccggtcatcggggaagcccagaccgagttccagtactttgagtcgaaggggctccctgccgagctgaagtccattttcaagctcagtgtcttcatcccctcccaggaattctccacctaccgccagtggaagcagaaaattgtacaagctggagataaggaccttgatgggcagctagactttgaagaatttgtccattatctccaagatcatgagaagaagctgaggctggtgtttaagagtttggacaaaaagaatgatggacgcattgacgcgcaggagatcatgcagtccctgcgggactttgggagtcaagatatctgaacagcaggcagaaaaawttctcaagagcakggwtaaaaacggcacgatgaccatcgactggaacgagtggagagactaccacctcctncaccccgtggaaaacatccccgagatcatcctctactggagcatt

SEQ ID NO: 408 - DNA, 647 bp, Homo sapiens
  SITE (15): n equals a,t,g, or c
gctggttgggttgcnggggctcggttgttgtagtcgcgatgttcttctccgaggccagagccakgtcgcggacgtgggaagccagtccctcggaacacaggaagtgggtggaagtatttaaagcatgtgatgaagatcacaaaggatatctcagcagagaggactttaaaactgctgttgtaatgctgtttgggtacaagccctccaagatagaagtggattctgtgatgtcttcaataaatccaaatacttctggtatattactcgaggggtttttaaatattgtcaggaaaaagaaggaagctcaacgatatcggaaygaagtaagacacatcttcacagcctttgacacctactatcgtggatttttaactttggaagatttcaaaaaagcatttaggcaggtggctcccaaattaccggaaaggrstgttcttgaggtattcagggaagtagatcgagattcagatggtcacgtcagctttagagactttgaatatgccctgaactatggacagaaggaagcctaactattgtgaactacttttggtaactctggggagatcaatagattgtaatgtcagcagactckactctactaatgatgkcatgctacagacttgtgattaaacatttaaaaattttta

SEQ ID NO: 409 - DNA, 450 bp, Homo sapiens
  SITE (332): n equals a,t,g, or c
  SITE (398): n equals a,t,g, or c
tccacgcctgcaggtaccggtccggaattcccgggtcgacccacgctttcgttgggaacgcatcctggagatcttcttcagacacctttttgctcaggtgctggacatcaaccaggccgacgcagggaccctgcccctggactcctcccagaaggtgcgggaggccctgacctgcgagctgagcagggccgagtttgccgagtccctgggcctcaagccccaggacatgtttgtggagtccatgttctctctggctgacaaggatggcaatggctacctgtccttccgagagttcctggacatcctggtggtcttcatgaaaggctccccanaggataagtcccgtctaatgtttaccatgtatgacctggatgagaatggcttcctttccaaggacnaattcttcaccatgatgcgatccttcatcgagatcttccaacaactgcctgt

SEQ ID NO: 410 - DNA, 757 bp, Homo sapiens
  SITE (80): n equals a,t,g, or c
  SITE (659): n equals a,t,g, or c
  SITE (664): n equals a,t,g, or c
  SITE (756): n equals a,t,g, or c
ggtgacttcctcggccaggccgtctgcgcctctgggaccatgttgcgctggctgcgggacttcgtgctgcccaccgcggnctgccaggacgcggagcagccgacgcgctacgagaccctcttccaggcactggaccgcaatggggacggagtggtggacatcggcgagctgcaggaggggctcaggaacctgggcatccctctgggccaggacgccgaggagaaaatttttactactggagatgtcaacaaagatgggaagctggattttgaagaatttatgaagtaccttaaagaccatgagaagaaaatgaaattggcatttaagagtttagacaaaaataatgatggaaaaattgaggcttcagaaattgtccagtctctccagacactgggtctgactatttctgaacaacaagcagagttgattcttcaaagcattgatgttgatgggacaatgacagkggactggaatgaatggagagactacttcttatttaatcctgktacagacattgargaaattatccgtttctggaaacattctacaggaattgacataggggatagcttaactattccagatgaattcacggaagacgaaaaaaaatccggacaatggtggaggcagcttttggcaggaggcattgctggtgctgnctctngaacaagcactggccctttggaccgtctgaaaatcatgatgcaggttacgggtcaaaatcagacaaaatgaacatatttgggggctttcgant

SEQ ID NO: 411 - DNA, 967 bp, Homo sapiens
  SITE (659): n equals a,t,g, or c
  SITE (697): n equals a,t,g, or c
  SITE (715): n equals a,t,g, or c
  SITE (869): n equals a,t,g, or c
  SITE (879): n equals a,t,g, or c
ggggctgaggcggcgcggcggacctgcagcggcggtgagcaggctacgcacaggtgcgggggcggcgcctggacgaccgaggccagctgcagtggcggcgagggcgggcagagcagggtctccccgcgcctgcccgcgcgcagggtggcggtgctgagggacgcggagtcgccgtgtgacgtgcgggaggcgcgcgagggccagcatggctgagagctagcaaggaaaactcaggaccatgatggctcagtttcccacagctatgaatggagggccaaacatgtgkgctattacctctgaagaacgtactaagcatgacaggcagtttgataacctcaaaccttcaggaggttacataacaggtgatcaagcacgtaattttytcctacaatcaggtctgccggcccctgttttagctgaaatatgggctttatcagacctaaacamgkatgggaagatggatcagcaagagttctccatagctatgaaactcatcaaactgaagcttcaaggccaacagttgcctgtggttctccctcctattatgaagcaaccccctatgttttctccattaatttctgctcgttttggaatgggaagcatgcccaatctgtccattcctcagccattgcctccagctgcacctataacatcattgncttctgcgacttcagggaccaacctttcttcccttaangatgcccactcccctagngccttctgttagcacatcatcattaccaaatggaaaccaccttcagtaccattagcccaccataccaagtaacaagttaggcaggaatcgtgggaatttattgagtcaagctttgagtgtttgagagaatgtaaacaagattggctcgaattgnaaacgtttgnactttggatgaagtcatgggtctttaggtcaccttaataccagctatctttggtagaagctacagcattcaagtttctctggaaactg

SEQ ID NO: 412 - DNA, 3026 bp, Homo sapiens
ttgctgtctggcctgcttttgttgactctggcgattgcggtgttaaatacactcgtgccgctttggctcgcccaggaacacatgtccacatggcaggtaggcgttgtcagctcatcctattttaccggcaaccttgtcggtacattgctgacagggtatgtcattaagcgcattggctttaaccgcagctattatctggcctccttcatttttgccgctggctgtgccggccttggcctgatgattggattctggagctggttggcttggcgttttgtcgcgggcgtcggctgtgccatgatttgggtggttgttgagagcgcgctgatgtgcagtgggacgtcacgtaaccgtgggcgtttgcttgctgcgtatatgatggtttattacgtgggaacgtttttaggccagttactggtcagcaaagtttcaaccgagctgatgtccgtattgccgtgggttacaggtttgacgttggcagggatcttaccgctgttgtttacgcgtgtgctgaatcagcaggctgaaaaccatgattcgacgtcaattacgtcaatgctaaaactccgtcaggcgcggcttggcgtgaatggctgcattatctcaggaatcgttctgggatctctatatggcctgatgccgctgtacctcaatcacaaaggggtgagcaatgccagcattggtttctggatggcggtactggtcagtgcgggtatccttggacaatggccgattggacgtctggcggataagtttggtcgactgctggtgttgcgtgttcaggtctttgtcgtcattctcggcagtatcgcgatgcttagccaggcggcgatggccccagcgttattcatcctcggtgccgctggctttacgctatatccggtggcgatggcatgggcttgcgagaaagttgaacatcatcaactggtggcgatgaaccaggccttactgttgagctatactgtgggaagtctgcttggcccgtcatttaccgctatgctaatgcagaatttctccgataatttattgtttatcatgatcgccagcgtatcgtttatctatttgctgatgctgctgcgcaacgccggtcatacgccgaaacccgttgctcacgtgtaaatgaattcaagcagagtgtgaacttactgtttcacactctgcttttttgtttcttctatctgacttgctttattccaaattttattcgtttaaaaataaaatgtgcagcaggttataattttgcatttcgctatttccgcacttcttatttgccgcgcataatccctcgttttaccgatgcccctttaattttggcgaaggatttgtctatggctgggaatggtcaggaaaaacagttgcgatggtacaacattgcgctgatgtcttttatcactgtctggggtttggcacgttgttaataactatgccaccagggctggtgggtgtttttcatgggtgttatctttgcactctattcacaccttatgcgctaattgttggtcagttaggctcgccttcaaagatggaaggccgggtcagtacctggattaacacacgatgggacccggactggcttatctcgccgcgtggacctactgggtggtgcatattccctatctggccaaaaaccccaggcaattctgattgcgctcggttggcgatgaaaggcgacggttcgctaatcaaagaatattcagtcgtagcgttacaggggttaacgctggtgctgtttatcttctttatgtgggttgcttcacgcggtatgaaatcgctgaaaatcgtcggttctgtggcagggattgctatgtttgttatgtcactcctgtatgtggcgatgcggtaaccgcgcctgcaattactgaagtgcatattgcgaccacaaacattacctgggaaacgttcattcctcatatcgactttacctacattaccactatttcaatgctggttttcgcggttggcggagcagagaagatttctccttacgttaatcaaacgcgcaacccaggaaaagaatttccaaaagggatgttatgcctggcggtgatggttgcggtttgtgccattctgggctcgctggcgatggggatgatgtttgattcgcgtaatatcccggatgacttaatgaccaacggtcagtattacgcctttcagaagctgggcgagtattacaacatgggtaatactttaatggtgatttacgccattgcgaataccctgggacaagtagcggcgctggtattctcgattgatgccccgcttaaagtgctattaggtgatgctgacagcaaatatattccagccagtttatgtcgtaccaacgcttctggtacgcccgttaatggctattttctgaccctggtactggtggcgattctgattatgctgccgactctcggcattggtgatatgaacaatctctataaatggctgttgaaccttaattcggtagtgatgccgctgcgttatttatgggtatttgttgcatttattgcagtcgttcgcttggcgcagaaatataaaccagaatatgtctttattcgtaataagcctctggcaatgaccgtcgggatttggtgttttgcctttaccgcctttgcctgtttgacggggatcttcccgaaaatggaagccttcactgcagagtggaccttccagttggcgctgaatgttgcaacgccgtttgtgctggtaggattaggactgatattcccgctgctggcgcgtaaagcgaatagtaaataattattgtggtcggtgacgctgactctggcagatctgacccgtttttacataatcgagaaatgcgcgcaagccgcaggacatatactggcggtttggataatagatctggaagcctggacgctctgtgctccagtcttccagtacacattctaaacgaccagtatcaaggtactccttgatctgttcatagagcagatacccgataccagcacccatcaaaacggcctccagttcagcatcaacatcatccagaatgatatttcctgcgacagcaatttcca

SEQ ID NO: 413 - DNA, 546 bp, Homo sapiens
  SITE (472): n equals a,t,g, or c
  SITE (524): n equals a,t,g, or c
ttcctgtctggcctgcttttkttgactctggcgattgcggtgttaaatacactcgtgccgctttggctcgcccaggaacacatgtccacatggcaggtaggcgttgtcagctcatcctattttaccggcaaccttgtcggtacattgctgacagggtatgtcattaagcgcattggctttaaccgcagctattatctggcctccttcatttttgccgctggctgtgccggccttggcctgatgattggattctggagctggttggcttggcgttttgtcgcgggcgtcggctgtgccatgatttgggtggttgttgagagcgcgctgatgtgcagtgggacgtcacgtaaccgtgggcgtttgcttgctgcgtatatgatggttattacgtgggaacgttttaggccattactggtcagcaaatttcaaccgagctgatgtccgtaatggccgtggggtacaaggttgacgntggcaagggatcttaccgctgttgtttacgcggtgctgaaatcagcaggtgnaaaccatgatcgaacgtcaatt

SEQ ID NO: 414 - DNA, 991 bp, Homo sapiens
  SITE (60): n equals a,t,g, or c
  SITE (382): n equals a,t,g, or c
  SITE (863): n equals a,t,g, or c
  SITE (874): n equals a,t,g, or c
  SITE (890): n equals a,t,g, or c
  SITE (929): n equals a,t,g, or c
  SITE (977): n equals a,t,g, or c
ccatgatcccacgtcaattacgtcaatgctaaaactccgtcaggcgcggcttggcgtgantggctgcattatctcaggaatcgttctgggagctctatatggcctgatgccgctgtacctcaatcacaaaggggtgagcaatgccagcattggtttctggatggcggtactggtcagtgcgggtatccttggacaatggccgattggacgtctggcggataagtttggtcgactgctggtgttgcgtgttcaggtctttgtcgtcattctcggcagtatcgcgatgcttagccaggcggcgatggccccagcgttattcatcctcggtgccgctggctttacgctatatcccggtggcgatggcatgggcttgcgagaaagntgaacatcatcaactggtggcgatgaacccaggccttactgttgagctatactgtgggaagtctgcttggcccgtcattaccgctatgctaatgcagaatttctccgataattwattgkttatcatgatcgccagcgtatcgttwatctatttgctgatgctgytgcgcaacgccggtcatacgccgaaacccgttgctyacgtgtaaatgaatycaagcagagtgkgaacttactgtttcacactctgcttttttgtttcttctatctgacttgctttattccaaattttattcgtttaaaaataaaatgtgcagcaggttataattttgcatttcgctatttccgcacttcttatttgccgcgcataatccctcgttttaccgatgcccctttaattttggcgaaggatttgtctatggctgggaatggtcagggaaaaacagttgcgaaggtacaacattgcgctgatgtcttttatnctgtctggggntttggcaccgttgttnaataactatgccaaccaggggctggtgggtggttttttnatggggtggttatctttgcactctaattcaacacccttaatgccgctnaattggtgggcaag

SEQ ID NO: 415 - DNA, 440 bp, Homo sapiens
  SITE (1): n equals a,t,g, or c
  SITE (7): n equals a,t,g, or c
  SITE (17): n equals a,t,g, or c
  SITE (48): n equals a,t,g, or c
ncccatnattagtcatnatatttgcgatcatttgcattggctgccggncggtggctggaatggtggggcggcttaaattcatgatattgccgatggtggcgttcggtggcaaagcggtagaggggaaaggatattattatccgccgacattgctgctggatgttcgccaggaaatgtcgattatgcatgaggaaacctttggcccggtgctgccagttgtcgcatttgacacgctggaagatgctatctcaatggctaatgacagtgattacggcctgacctcatcaatctatacccaaaatctgaacgtcgcgatgaaagccattaaagggctgaagtttggtgaaacttacatcaaccgtgaaaacttcgaagctatgcaaggcttccacgccggatggcgtaaatccggtattggcggcgcagatggtaaacatggc

SEQ ID NO: 416 - DNA, 689 bp, Homo sapiens
  SITE (682): n equals a,t,g, or c
gaaagagccaataactcagactttggactcgtagcagctgtctttactaatgacatcaacaaggccctcacagtgtcttctgcaatgcaagctgggactgtttggatcaattgttacaatgccttaaatgcccagagcccctttgggggattcaagatgtctggaaatgggagagaaatgggagaatttggcttgcgggagtactcagaagttaagacggtgacagtaaagatcccccagaagaactcctaagaaggccaagaaggaggatgaagcccagcctgcacgtctgtccctctctgctttctctgtagggcccagctctcaggaatacaaagttgagccacggtccttacttaaagattgaaaagataacatgtaggccaggcaggtcactgcacaactaaagcaaaccagctgggtacagtttcttggcactctgtaaggggccaccttaatcataccaaatattggggaaagtgggataaagggaggaggaggagctagcagacacatccagtatctccttctggagcacaggatgaaataagggagctgtattatttcatgtctttgtcacaaagaactttcctctcaaggaaaggtgacctttctcctgtcttcattttcctccttccaggscctcctcgctcacccacccctcctctcttccaaggagatngtcagct

SEQ ID NO: 417 - DNA, 467 bp, Homo sapiens; identical to SEQ ID NO: 102

SEQ ID NO: 418 - DNA, 764 bp, Homo sapiens
  SITE (561): n equals a,t,g, or c
  SITE (626): n equals a,t,g, or c
  SITE (689): n equals a,t,g, or c
  SITE (723): n equals a,t,g, or c
  SITE (740): n equals a,t,g, or c
gccttactcgtatatttaaaatatctgatcaagataatgatggtactctcaatgatgctgaactcaacttctttcagaggatttgtttcaacactccattagctcctcaagctctggaggatgtcaagaatgtagtcagaaaacatataagtgatggtgtggctgacagtgggttgaccctgaaaggttttctctttttacacacactttttatccagagagggagacacgaaactacttggactgtgcttcgacgatttggttatgatgatgacctggatttgacacctgaatatttgttccccctgctgaaaatacctcctgattgcactactgaattaaatcatcatgcatatttatttctcaaagcacctttgacaagcatgatttggatagagactgtgctttgtcacctgawgagcttaaagattwatttaargttttcccttamataccttgggggccagatgtgaataacacagtttgtaccaatgaaaaaggctggataacctaccagggattcctttcccagtggacgctcacgacttatttagagtacancggtgcctggaatattgggctatctaggctatcaatattgactgagcaagagtctcaagctcacngttacagtgacaagagataaaaagatagacctgcagaaaaacaaactcaagaatgtgttcagngtaagtaatggagtggaaaacgtgggaaagtggnttctcaggcctctgganaactaatgggcgagaaatcgggag

SEQ ID NO: 419 - DNA, 399 bp, Homo sapiens
gaggaagtggaagaagagaaagacagccaccaaaaagggcacggcggccccctacttcaatgaggccttcaccttcctggtgcccttcagccaggtccagaatgtggacctggtgctggctgtctgggaccgcagcctgccgctccgaactgagcccgtaggcaaggtgcacctgggtgcccgggcctcggggcagcccctgcagcactgggcagacatgctggcccamgcccggcggccattgcccagcggcamcccctgcggcagccagggaggtggaccgcatgctggccctgcagccccgmcttckcctgcgcctgcccttgccccactcctgaatgcaccacatgcctctgtctccccgctgagcccaggcacttgcccaggccgccctgcagg

SEQ ID NO: 420 - DNA, 351 bp, Homo sapiens
  SITE (85): n equals a,t,g, or c
  SITE (341): n equals a,t,g, or c
ggcagaggaggaaatcagcatccagcaggatgaggacctggtcatctttagcgagacctcactggatggctggctgcagggccanaacagccgtggggagacagggctctttcctgcctcttatgtggagatcgtccgttctggcatcagcaccaaccatgctgactactccagcagccctgcaggcttctcccggagcccaggtgagcttgtgacaacagccccagtgtggccagcccagctaggagtggtgggggcagtggcttcctctcaaaccagggtagctttgaggaggatgatggatgatggactggggatgactggggacgacggatgcacantggtgggagg

SEQ ID NO: 421 - DNA, 706 bp, Homo sapiens; identical to SEQ ID NO: 110

SEQ ID NO: 422 - DNA, 442 bp, Homo sapiens
ccttacttattattattgccgtgttaggctatatctattcaattcagactacagagtgggcgattttaatctatggactggtgatgatcttctttttatacatgtatgtttgcttcgcgtcggcggtttatatcccggagctttggccaacgcatttacgcctgcgcggttcgggtttcgttaatgccgtcggacggatcgtcgcagtcttcacgccctatggcgttgcggcattattaacacattatgggtcgatcacggtgtttatggtacttggtgttatgttattgctctgtgcgctggttctctccatttttggcatcgaaacgcggaaggtgtcgttggaagagattctgaggtgaataaatctttcgttgaggcatcaattgccagatgtgccactgacgtgttttawttggcctacaatgccagtacagaattg

SEQ ID NO: 423 - DNA, 608 bp, Homo sapiens
  SITE (574): n equals a,t,g, or c
  SITE (592): n equals a,t,g, or c
  SITE (595): n equals a,t,g, or c
  SITE (601): n equals a,t,g, or c
cctcgacgatggcgtcgatattgccgaaagcgatccctttttctgcagccagttccaactgccagccaatccgttgttcagcaaaaaacgttgaccagcgacgttgccaggtgttgggctgtggagttgtggagagcgcgttatcgaaatcaaggccaaattgtggttggtcgctccattgatgtaaacgcgcaatttgctgaccaagaataaatgcgctatgcgcatccagcggacgaggtgggagataatccatcaccagaaaactgtagtcacggtcagcgccaactgcccaaaccttaggcacggtgacggttttactacgcgacagtaactccagttggtcggcttcggcggtaaaaccggaattccatcgcccggagatgccagatttcaccattcatgaatatacgccgctgatggatcttcagatatgacgccggaagactggcagcatattgctgaagatattaaagcgcactatgacgactaatgatggtttgtcattctgcacggcacccgacacgatggcgtataccgcctctgcgctgtcgttcatgccgagaatctcggnaaccggtcattgtgaaanggnacaatnccgctgg

SEQ ID NO: 424 - DNA, 686 bp, Homo sapiens
  SITE (19): n equals a,t,g, or c
  SITE (28): n equals a,t,g, or c
aaggcccaaaagctgttcnccaccgcgncggcggccgctctagaactagtggatcccccgggctgcaggaataaamcaatgaacmagaagattcattccctggccttgttggtcaatctggggatttatggggtagcgcaggcacaagagccgaccgatactcctgtttcacatgacgatactattgtcgttaccgccgccgagcagaacttacaggcgcctggcgtttcgaccatcaccgcagatgaaatccgcaaaaacccggttgcccgcgatgtgtcgaagatcatccgtaccatgccaggcgttaacctgaccggtaactccaccagtggtcagcgtgggaataaccgacagattgatattcgcggtatgggtccggaaaacacgctgattttgattgacggcaagccggtaagcagccgtaactcggtgcgtcagggctggcgtggcgagcgcgatacccgtggtgatacttcctgggtgccacctgaaatgattgaacgtattgaagttctgcgtggtccggcagctgcgcgttatggcaacggcgcggcgggcggcgtggttaacatcattaccaaaaaaggcagcggcgagtggcacggctcctgggacgcatatttcaatgcgccagaacataaagaggaaggtgccaccaaacgcactaactttagcctgaccgg

SEQ ID NO: 425 - DNA, 836 bp, Homo sapiens
  SITE (786): n equals a,t,g, or c
  SITE (821): n equals a,t,g, or c
  SITE (825): n equals a,t,g, or c
ggtctgtagtctcatctgaaagctcagctggggcaggatccactcccatgcttactgacatggttgctggcaagattccattccttgaaggtttttgcactgagggcctcagttccttgctggctgttggccagaggctaccttcagttccttgccaagtggccttctccatcaaagcaaatatatgagaagggccagggaaagagaacaccaagacagaagtcacagtcttttatcacctgacctcaaaagtgacaccttatcacttttgctgtcttctagtcattagaagtgtccttgtgactctgtggattattgaccgcctggggcgcaagaagaccatggccctgtgctttgtcatcttctccttctgcagcctcctgctgtttatctgtgttggaagaaatgtgctcactctgttactcttcattgcaagagcgtttatttctggaggctttcaagcggcatatgtttacacacctgaggtctaccccacggggcgggccctcggcctgggcacctgcagcggcatggcaagagtgggtgctctcatcactccgttcatcgcccaggtgatgctggaatcctctgtgtacctgactctggcagwgttacagtggmtgctgsctcctggctgscctggcctcctgctttttgsccattgagaccaaaggccgaggactgcaggagtccagccaccgggagtggggccaggagatkgtcggccgaggaatkcacggtgcaggtgttaccaggtcgaactctkgctctcaggaatagtgaccnatgggggactgagctggtctttgaggctgcagagntttngggggctggca

SEQ ID NO: 426 - DNA, 377 bp, Homo sapiens
gaacatcctggacaagaattagagattgagctctttgatgaagacccagacaaggatgactttttaggaagtcttatgattgacctcattgaagttgaaaargagcgccttttagatgaatggttcactctggacgaggttcccaaggggaagctacacttgagactggagtggctcacgttaatgccaaatgcgtcaaacctcgacaaggtgctaacagacatcaaagctgacaaagaccaagccaacgrtggtctttcctctgcattgctgatcttgttacttgggattccagcaagggmaccttccggtagktaacacatggttaacaccgtgggtggcgtattttccccaggcagtgctcttgtttttaacca

SEQ ID NO: 427 - DNA, 755 bp, Homo sapiens
gccggatgctacattgatttttgagattgaactttatgctgtgaccaaaggaccacggagcattgagacatttaaacaaatagacatggacaatgacaggcagctctctaaagccgagataaacctctacttgcaaagggaatttgaaaaagatgagaagccacgtgacaagtcatatcaggatgcagttttagaagatatttttaagaagaatgaccatgatggtgatggcttcatttctcccaaggaatacaatgtataccaacacgatgaactatagcatatttgtatttctactttttttttttagctatttactgtactttatgtataaaacaaagtcacttttctccaagttgtatttgctatttttcccctatgagaagatattttgatctccccaatacattgattttggtataataaatgtgaggctgttttgcaaacttaacttgcaggaatggtatgactgtgtttcctactgctttattctgtaaacaagaattgtagcaccatgaaacagacctctgggtcccagtgggcattttttcccctttcaggatgtaggaggacatgtatagtatgtcaaaaactgcagmttttcccaactttaaccttaccagcatgttaatatccagtttttttatagtttaaaagttaaagtgcctcatattttgaaaatatccattaaggacccaggaattagcatttcacttgtttatacatttttataacattatgaagacgatataaaa

SEQ ID NO: 428 - DNA, 396 bp, Homo sapiens
  SITE (348): n equals a,t,g, or c
  SITE (350): n equals a,t,g, or c
  SITE (384): n equals a,t,g, or c
aagaaatgagatggagaagtacgagcggatccgagtggtggggarargtgccttcgggattgtgcacctgtgcctgcgaaaggctgaccagaagctggtgatcatcaagcagattccagtggaacagatgaccaaggaagagcggcaggcagcccagaatgagtgccaggtcctcaagctgctcaaccaccccaatgtcattgagtactacgagaacttcctggaagacaaagcccttatgatcgccatggaatatgcaccaggcggcactctggctgagttcatccaaaagcgctgttaattccctgctggaggaggagaccatcctggcaatttttcgtgcagatncnggttgcaatggcattcatgtgcacaaccaacttnatcctggcaccg

SEQ ID NO: 429 - DNA, 641 bp, Homo sapiens
  SITE (236): n equals a,t,g, or c
  SITE (412): n equals a,t,g, or c
  SITE (556): n equals a,t,g, or c
  SITE (584): n equals a,t,g, or c
  SITE (602): n equals a,t,g, or c
ggcgacccagctccctggaggcccaggcacctcatgtctgccctcaacccagagtggagcagaccttccctggagcttctcaggagccacttcaaaagttcgtgccctcgtgaggctggcatgcaggatggcaggacagcccggccacatgccccatggagggagttccaacaacctctgccacaccctggggcctgtgcatcctcctgacccacagaggcatcccaacacgctgncttttcgctgctcgctggcggacttccagatcgaaaagaagataggccgaggacagttcagcgaggtgtacaaggccacctgcctgctggacaggaagacagtggctctgaagaaggtgcagatctttgagatgatggacgccaaggcgaggcaggactgtgtcaaggagatcggnctcttgaagcaactgaaccacccaaatatcattaagtatttggactcgtttatcgaagacaacgagctgaacattgtgctggagttggctgacgcaggggaccttttcgcagatgatcaagtactttaagaaagcagaagcggntcatcccggagaggacagtatggaaagnctttgtgcaactgtgcancgccgtggagcacatgcattcacgcccgggtgatgcacc

SEQ ID NO: 430 - DNA, 776 bp, Homo sapiens
  SITE (6): n equals a,t,g, or c
  SITE (11): n equals a,t,g, or c
  SITE (30): n equals a,t,g, or c
  SITE (592): n equals a,t,g, or c
  SITE (617): n equals a,t,g, or c
  SITE (631): n equals a,t,g, or c
  SITE (652): n equals a,t,g, or c
  SITE (661): n equals a,t,g, or c
  SITE (708): n equals a,t,g, or c
  SITE (747): n equals a,t,g, or c
taaaanggctnctccaattaacctcctaanggaacaaagctggagctccccgcggtggcggccgctctagaactagtggatcccccgggctgcaggattcggcacgaggtttttgacttgttgtctgatatgcatggtactttgacttttgtcctgattcccagtcaacagatcaagccgcctcctgccaagaaacagtaatccatgtaaaagctcattttgactatgacccctcagatgacccttatgttccatgtcgagagttaggtctgtcttttcaaaaaggtgatatacttcatgtgatcagtcaagaagatccaaactggtggcaggcctacagggaaggggacgaagataatcaacctctagccgggcttgttccaggtaagacacaatatggtagaaagtacataatattaaaagaacattgaaaakgcaagccttcacaaagaaaaactcactctttcatgcctctatttaataaagtattccagttactttttcgtgtagttgggtttttatgttgtacctgcagcgtaagtatattaaatagaatgtggccaattctttggcctttagaatggaattatgnataacttcagccaatcccatattgnagtacatttcctgnatacatattaaagatgacccnattatcgangcaatacaacttggattatactatatactatatactatgacattaantggagcattaacatgaattttgagaaaggaagatgcatnactttataagagtcaggaaagtacatctt

SEQ ID NO: 431 - DNA, 1165 bp, Homo sapiens
  SITE (346): n equals a,t,g, or c
  SITE (348): n equals a,t,g, or c
  SITE (1160): n equals a,t,g, or c
gtggaactcgggctgtcagctggtggccttgaacttccagacgccaggctacgagatggacctcaatgccgggcgcttcctagtcaatgggcagtgtggctacgtcctaaaacctgcctgcctgcggcaacctgactcgacctttgacccygagtacccaggacctcccagaaccactctcagcatccaggtgctgactgcacagcagctgcccaagctgaatgccgagaagccacactccattgtggaccccctggtgcgcattgagatccatggggtgcccgcagactgtgcccggcargagactgactacgtgctcaacaatggcttcaacccccgctggggncnagaccctgcagttccagctgcgggctccggagctggcactggtccggtttgtggtggaagattatgacgccacctcccccaatgactttgtgggccagtttacactgcctcttagcagcctaaagcaagggtaccgccacatacacctgctttccaaggacggggcctcastgtcaccagccacgctcttcatccaaatccgcatccagcgctcctragggcccacctsactcgccttggggttctgcgagtgccagtccacatcccctgcagagccctctcctcctctggagtcaggtggtgggagtaccagccccccagcccacccacttggsccactcagcccattcaccaggcgctggtctcacctgggtgctgagggctgcctgggcccctcctgaagaacagaaaggtgttcatgtgacttcagtgagctccaaccctggggccctgagatggccccagctcctcttgtcctcagcccacccctcattgtgacttatgaggagcaagcctgttgctgccaggagacttggggagcaggacacttgtgggccctcagttcccctctgtcctcccgtgggccatcccagcctccttcccccagaggagcgcagtcactccacttggccccgaccccgagcttagcccctaagccctcctttaccccaggccttcctggactcctccctccagctccggaacctgagsttccccttcccttytcaaagcaagaagggagcgctgaggcatgaagccctgggggaaactgggcarttaggttttggtttttawtttttgagamaggggtnggttc

SEQ ID NO: 432 - DNA, 481 bp, Homo sapiens
cgccagctcgaaattaaccctcactaaagggaacaaaagctggagctccaccgcggtggcggccgctctagaactagtggatcccccgggctgcaggaattcggcacgaggttttattctcactgcttctgggcagagggagctgggaaggagccccggggccacctgacatggtccctgtccacagggctgggctgtgtcacgctgtccttcctgatcagcctgtactacaacaccatcgtggcgtgggtgctgtggtacctcctcaactccttccagcacccgctgccctggagctcctgcccaccggacctcaacagaacaggtgagctgggcgccgcctgctgtgtgggtccgtgcacggccgagagaggcatgtgctgcagcgtgtccagcatcagagcagctgcgggtggcggatgctcamcgcggggggarggccggggaacggttgctctgtgtgcacatgcacgcgcctcgg

SEQ ID NO: 433 - DNA, 1210 bp, Homo sapiens
ggaaggatgagaagaccgcccagacgagggagagccacgcaaaggcagacagcgccgtctcccaggagcagctgcgcaaactgcaggaacgggtggaacgctgtgccaaggaggccgagaagacaaaagctcagtatgagcagacgctggcagagctgcatcgctacactccacgctacatggaggacatggaacaggcctttgagacctgccaggccgccgagcgccagcggcttcttttcttcaaggatatgctgctcaccttacaccagcacctggacctttccagcagtgagaagttccatgaactccaccgtgacttgcaccagggcattgaggcagccagtgacgaagaggatctgcgctggtggcgcagcacccacgggccaggcatggccatgaactggccacagttcgaggagtggtccttggacacacagaggacaatcagccggaaagagaagggtggccggagccctgatgaggttaccctgaccagcattgtgcctacaagagatggcaccgcacccccaccccagtccccggggtccccaggcacggggcaggatgaggagtggtcagatgaagagagtccccggaaggctgccaccggggttcgggtgagggcactctatgactacgctggccaggaagctgatgagctgagcttccgagcaggggaggagctgctgaagatgagtgaggaggacgagcagggctggtgccaaggccagttgcagagtggccgcattggcctgtaccctgccaactacgtggagtgtgtgggcgcctgagtgtcctgacagcccttctgcaacgtttacccaccctggttcagagcccagcttctcctggagagccggaccctcagggccctgaaccgtcgctctctggctgctcctctgtcccttgagggaggaagtcctgggacccagggaggggaggggcctttgtctagggaagggactggtagggaagggacgagtctaggctgagggcaagatgggaggtcagaggtgacagaagcgttcaggggtgcctgggcctccccaggagctgtggactcagttcctgacctctgctttggggttcctggggtgggcttggggtgagtgtagttctggcctagcagcaccctcttgtggcttgttctagcgtgtattaaaacttgacacacacccacacacaaaaacaaaaacaccaaaaaaaa

SEQ ID NO: 434 - DNA, 418 bp, Homo sapiens
  SITE (209): n equals a,t,g, or c
  SITE (390): n equals a,t,g, or c
  SITE (417): n equals a,t,g, or c
gggagcaccccttcctggtcaatctgtggtactmcttccaggatgaggaggacatgttcatggtggtggacctgctcctgggaggcgacctgcgctaccatctgcagcagaatgtgcatttcacagaggggactgtgaaactctacatctgtgagctggcactggccctggagtatcttcagaggtaccacatcatccacagagacatnaagccagacaatatcctgctggatgaacacggacatgttcacattacagacttcaacatagcgacggtagtgaaaggagcagaaagggcttcctccatggctggcaccaagccctacatggctccagaagtattccaggtgtacatggacagaggccccggatactcgtaccctgtcgacnggaggtccctgggcatcacagcctatna

SEQ ID NO: 435 - DNA, 911 bp, Homo sapiens
  SITE (9): n equals a,t,g, or c
  SITE (19): n equals a,t,g, or c
  SITE (118): n equals a,t,g, or c
aaagcaggnagtccatttntggcaacaatccgggcagaatgagcccaggggagacagcatcatttaacaaaacatctggaaaaagttcctgtgaaggcattcgacagacctgggaggnatcttcttcccctctcaacccaaccacgtccctcagtgctatcattagaactcccaaatgttatcatatctcgtcgctgaatgaatgccgccaaacgtctgtgtcgcaggtattctcagaaactgayccagcacaccgcctgtcagctgctgagaacttaccctgctgccacccgcatcgactcttccaacccgaaccccctcatgttctggctccatgggatacagcttgtggcactcaactaccagactgatgatctccctttacatttaaatgctgcaatgtttgaggcaaatggtggttgtggttatgtattgaaacctccagttctgtgggacaagaactgccccatgtatcagaagttttctccactagaaagagatctggacagcatggatcctgcagtctattctttaactattgtctctggtcagaatgtgtgccccagtaatagcatgggaagcccgtgcattgaagtcgacgtcctgggcatgcctctggacagctgccatttccgcacaaagcccatccatcgaaacaccctgaaccccatgtggaacgagcagtttctgttccacgttcacttcgaagatcttgtatttcttcgttttgcagttgtggaaaacaatagttcagcggtaactgctcagagaatcattccactgaaagctttaaaacgaggatatcgacatcttcagctgcgaaaccttcacaatgaagtcttggagatttctagtttattcattaacagcagaaggrtgggaagaaaattccyctggcaataccmtgtcag

SEQ ID NO: 436 - DNA, 1361 bp, Homo sapiens
  SITE (885): n equals a,t,g, or c
gccatgctgcaggccacatgtgggactcctatctatatggcccctgaagttatcagtgcccacgactatagccagcagtgtgacatttggagcataggcgtcgtaatgtacatgttattacgtggagaaccaccctttttggcaagctcagaagagaagctttttgagttaataagaaaaggagaactacattttgaaaatgcagtctggaattccataagtgactgtgctaaaagtgttttgaaacaacttatgaaagtagatcctgctcacagaatcacagctaaggaactactagataaccagtggttaacaggcaataaactttcttcggtgagaccaaccaatgtattagagatgatgaaggaatggaaaaataacccagaaagtgttgaggaaaacacaacagaagagaagaataagccgtccactgaagaaaagttgaaaagttaccaaccctggggaaatgtccctgakrccaattacacttcagatgaagaggaggaaaaacagtctactgcttatgaaaagcaatttcctgcaaccagtaaggacaactttgatatgtgcagttcaagtttcacatctagcaaactccttccagctgaaatcaagggagaaatggaraaaacccctgtgactccaagccaaggaacagcaaccaagtaccctgctaaatccggcgccctgtccagaaccaaaaagaaactctaaggttccctccagtgttggacagtacaaaaacaaagctgctcttgttagcactttgatgarggggtaggaggggaagaagacagccctatgctgagcttgtagccttttagctccacagagccccgccatgtgtttgcaccagcttaaaattgaagctgcttatctccaaancagcataagctgcacgtggcattaaaggacagccaccagtaggcttggcagtgggctgcagtggaaatcaactcaagatgtacacgaaggttttttaggggggcagataccttcaatttaaggctgtgggcacacttgctcatttttacttcaaattcttatgtttaggcacagctatttataggggaaaacaagaggccaaatatagtaatggaggtgccaaataattatgtgcactttgcactagaagactttgttagaaaattactaataaacttgccatacgtattacagcagaagtgcttcagtcattcacatgtgttcgtgagattttaggttgctatagattgtttaagacagcttattttaaatgtagaaaaataggagattttgtaactgcttgccattaacttgctgctaaattcccaatgtattgattaaatcaataaaaaacagatgttactcaaaaaaaaaaa

SEQ ID NO: 437 - DNA, 658 bp, Homo sapiens
  SITE (626): n equals a,t,g, or c
cctggctaggcctgatactgaccagcagatgggcgctgtgtttgtagccccagaggtggtaggccggcagcggtatggacgccctgtggactgctgggccattggagtcatcatgtacatcctgctttcaggcaatccacctttctatgaggaggtggaagaagatgattatgagaaccatgataagaatctcttccgcaagatcctggctggtgactatragtttgactctccatattgggatgatatttcgcaggcagccaaagacctggtcacaaggctgatggaggtggagcaagaccagcggatcactgcagaagaggccatctcccatgagtggatttctggcaatgctgcttctgataagaacatcaaggatggtgtctgtgcccagattgaaaagaactttgccagggccaagtggaagaaggctgtccgagtgaccaccctcatgaaacggctccgggcaccagagcagtccagcayggytgcagcccagtcggcctcagccacagacactgccacccccggggctgcagaccgtaagtgcccaccccagccacagatggaagtgccaccccagccactgatggcagtgtcaccccagccaccgatggaagcatcantccagccactgatggggagtgtcaccccagcg

SEQ ID NO: 438 - DNA, 1181 bp, Homo sapiens
  SITE (465): n equals a,t,g, or c
gtgtctctggcccccagccccagagctcttggagcagaaaccctacgggaaggccgtagatgtgtgggccctgggcgtcatctcctacatcctgctgtgtgggtacccccccttctacgacgagagcgaccctgagctcttcagccagatcctgagggccagctatgagtttgactctcctttctgggatgacatctcagaatcagccaaagacttcatccggcaccttctggagcgagacccccagaagaggttcacctgccaacaggccttgcggcacctttggatctctggggacacagccttcgacagggacatcttaggctctgtcagtgagcagatccggaagaactttgctcggacacactggaagcgagccttcaatgccacctcgttcctgcgccacatccggaagctggggcagatcccagaggcgarggggcctctgagcagggcatggccgcncacagccaytcaggcctccgtgctggccagccccccaaktggtgatgcccagttgagaatgggacccagagtagatgctgacctgggcactccaccattccggggccaccacagagatgccagcaggatgccactttgccagcccgacacacggacctttgtaaagaacagcaacaggcaggagaggcagcgtgtgaccagattgtgtcccgtcattgggtggcatatgttaactagctgccaaacaacttcaacccgtgtaattcatgtacatttgcaacagccagcccggtacagcctgtgtgacttctctgtatgtgtgtgtgtgtcgtgaccagcctaagtagttagcataactcaagatgctgatgtgcagtcacccatcagagaaaataaaaatggaaaccacgttcacagcattttaaaagtttttactttttttcttgattatggaagtaatccatgtacatagtaaatcattttaaaagtacaaaaagtatgaagaagtttgtcttaaaaaaaaaaaaattattcctccaactagagaccactctgatgtttcgacgttttaaaaaagtctttttttgtgcattttttcatcgttgacatcatattgtgrtatcatttataaccagttttttcctacttattataccaccatcttccacatcattaaaagctctttgtaaacattaaacactcttcataaatcaaaa

SEQ ID NO: 439 - DNA, 762 bp, Homo sapiens
  SITE (656): n equals a,t,g, or c
  SITE (702): n equals a,t,g, or c
  SITE (727): n equals a,t,g, or c
  SITE (758): n equals a,t,g, or c
ctcaaattgctctggggtagaaggagatgttactgacgaagatgaaggagcagaaatgtctcagaggatgggaaaagagaacatggagcaacccaataatgtgcctgtgaagcgatttcagctttgtaaagaactgtctgaactggtcagcatctgcaaatcagttcagttcaaagaatttcaggtgtcgtttcaggttcagaagtactgggaagtctgttcctttaatgaaktgcttgccagcaaktacgccaatgaaaatccaggggactttgtwaattacaacaaacgtttycttgctagggttttycccagtccaatgagaattgattccaktaacatgaatcctcaagatttttggaaatgtggttgccaaattgtagccatgaactttcagacaccaggactgatgatggrcctgaatattggctggtttaggcagaacggaaactgtggctatgtcctccggccagccatcatgagggaggaggtctccttcttcagcgccaatacaaaagactctgtcccaggggtctcacctcaacttcttcacattaaaatcatcagtgggcagaactttcccaagcccaaaggatcaggtgccaaaggtggatgtggtagatccttatgtctatgttggaaatcctgggattccntgttgattgtggcagaacaaaggacaaaaacagtggcaccagattnggagacgtttcccatttttggttgnaagtttttgaattttcaaaatcaacccggcntgaa

SEQ ID NO: 440 - DNA, 582 bp, Homo sapiens
  SITE (125): n equals a,t,g, or c
  SITE (138): n equals a,t,g, or c
  SITE (382): n equals a,t,g, or c
  SITE (402): n equals a,t,g, or c
  SITE (448): n equals a,t,g, or c
  SITE (449): n equals a,t,g, or c
tgggctgagcaggaacttgtgagattccagagccctgactacaggtgatcagcggtcagcaactccccaaagtggacaagaccaaagaggggtccattgtggatccactggtgaaagtgcagatntttggcgttcgtntagacacagcacggcaggagaccaactatgtggagaacaatggttttaatccatactgggggcagacactatgtttccgggtgctggtgcctgaacttgccatgctgcgttttgtggtaatggattatgactggaaatcccgaaatgactttattggtcagtacamcctgccttggacctgcatgcaacaaggtgagccagcccctttgacccctggccaataccccagctctggctgccttcntaatgctgtcctcctgcccnttccaggttaccgccacattcacctgctgtccaaagatggcatcannctcagcccagcttccatctttgtgtatatctgcatccaggaaggcctggagggggatgagtcctgaggtgggcatttcacgggaagggttggtatgctggctttagacggggagaaacatctggaaggatgct

SEQ ID NO: 441 - DNA, 490 bp, Homo sapiens
  SITE (101): n equals a,t,g, or c
  SITE (305): n equals a,t,g, or c
  SITE (452): n equals a,t,g, or c
  SITE (473): n equals a,t,g, or c
gcactgtggctaattgtagctcaaaagatctgcagagctcccagggcggacagcagcctcgggtgcaatcctggagccccccagtgaggggtatacctcanttaccatgtgccaaagcattatacaactatgaaggaaaagagcctggagaccttaaattcagcaaaggtgacatcatcattttgcgaagacaagtggatgaaaattggtaccatggggaagtcaatggaatccatggctttttccccaccaactttgtgcagattattaaaccgttacctcagcccccacctcagtgcaaagcnttttatgactttgaagtgaaagacaaggaagcagacaaagattgccttccatttgcaaaggatgatgttctgactgtgatccgaagagtggatgaaaactggggctgaaggaatgctggcagacaaaataggaatatttccaatttncatatgttggagtttaactcnggctgctaacactggat

SEQ ID NO: 442 - DNA, 843 bp, Homo sapiens
  SITE (28): n equals a,t,g, or c
  SITE (812): n equals a,t,g, or c
ggaagcgcccgcgcgggcgcaggcggcncggratggcggggcccggctggggtcccccgcgcctggacggcttcatcctcaccgagcgcctgggcagcggcacgtacgccacggtgtacaaggcctacgccaagaaggacactcgtgaagtggtagccataaagtgtgtagccaagaaaagtctgaacaaggcatckgtggagaacctcctcacggagattgagatcctcaagggcattcgacatccccacattgtgcagctgaaagactttcagtgggacagtgacaatatctacctcatcatggagttttgcgcagggggcgacctgtctcgcttcatccatacccgcagattctgcctgaraaggtggcgcgtgtyttcatgcagcaattagctagcgccctgcaattcctgcatgaacggaatatctctcacctggatctgaagccacagaacattctactgagctccttggagaagccccacctaaaactggcagactttggtttcgcacaacacatgtccccgtgggatgagaagcacgtgctccgtggctcccccctctacatggcccccgagatggtgtgccagcggcagtatgacgccgcttggacctctggtcatgggggtcatcctgtatgargccctcttcgggcagcccccctttgcctccaggtcgttctcggagctggaagagaagatccgtagcaaccgggtcatcgagctccccttgcggcccctgctctcccgagactgccgggacctactgcagcggstcctggagcgggaccccagccgtcgcatctccttncaggacttctttgcgcacccctgggtgggac

SEQ ID NO: 443 - DNA, 1247 bp, Homo sapiens
actgcctctgcccgaggacccagggaccctttcagcagagcgtcgttgcttgacacagcccgtggaggaccagggggtctccacccagctactcgcgccctctggcagcgtgtgcttctcctacaccggcacgccctggaagttgttcctacgcaaggaggtgttctacccacgggagaacttcagccatccctactacctgaggctcctctgtgagcagatcctacgggacaccttctccgagtcctgtatccggatttcccagaatgagcggcggaaaatgaaagacctgctgggaggcttggaggtggacctggattctctcaccaccaccgaagacagcgtcaagaagcgcatcgtggtggccgctcgggacaactgggccaattacttctcccgcttctttcctgtctcgggcgagagtggcagcgacgtgcagctgttagccgtgtcccaccgtgggctgcgactgctcaaggtgacccaaggccccggcctccgccccgaccagctgaagattctctgctcatacagcttygcggaggtgctgggtgtggaatgccggggcggctccaccctggagctgtcactgaagagcgagcagctggtgctgcacacagcccgggcaagggccatcgaggcgctggttgagctattcctgaacgagcttaagaaggactccggctatgtcatcgccctgcgcagctacatcactgacaactgcagcctcctcagcttccaccgtggggacctcatcaagctgctgccggtggccaccctggagccaggctggcagtttggctctgccgggggccgttccggactctttcctgccgacatagtgcagccggctgccgctcccgacttttccttctccaaggagcagaggagtggctggcacaagggtcagctgtccaacggggaaccagggctggctcggtgggacagggcctcagaggtgaggaagatgggagagggacaagcagaggcaaggcctgcctgagactgaggaaggaaaggggtttgaccactcccgaggctgccatgcggtgggaccaccctgctgtccgtctcctgtggctgcccctctgcccsctcctgatggmtcgccttgtctctccagcaagactgtgcactccttgcaggcaggggctgggctggrtgctgctcttgtgtcccacgtggtacttagttcaaggctgccccagcagatgcttaataaacagctcttcactttaaaaaaaaaa

SEQ ID NO: 444 - DNA, 501 bp, Homo sapiens; identical to SEQ ID NO: 136
  SITE (222): n equals a,t,g, or c
  SITE (225): n equals a,t,g, or c
  SITE (491): n equals a,t,g, or c
  SITE (498): n equals a,t,g, or c
  SITE (500): n equals a,t,g, or c

SEQ ID NO: 445 - DNA, 430 bp, Homo sapiens
  SITE (396): n equals a,t,g, or c
gcgactccccaagtcccgaagaggataaggaggaacacatttcacttgcgcacagaggagtggacgcgtcaaagaaaacttccaagactgttaccatatcccaagtgtctgacaactttgtaagagaaataaagaaagagatgaagaaagaccctctcaccaacaaagctccagaaaagcccctgcacgaagtgcccagtggaaactctttgctgtcttctgaaacgattttaagaaccaataagagaggcgagcgacggaggcgccggtgccaggtggcattcagctacctgccccagaatgacgatgaacttgagctgaaagttggcgacatcatagaggtggtaggagaggtakaggaaggatggtgggaaggtgttctcaacgggaagactngaatgtttccttccacttcatcaaggacttgtca

SEQ ID NO: 446 - DNA, 558 bp, Homo sapiens
  SITE (226): n equals a,t,g, or c
cagattgatgaatttgtccacactgaaagttcttcaacgaagatgcagctagtaaaacagaggcttgaaactgtcacagaggtgatacgttcctgtgctgcaaaagtcaacaaaaatctctcatttacttcaccaccagcagtttcctcacaacagtctaagttaaagcagtcaaacatgctgaccgctcaagagattctacatcagtttggtttcactcagaccnggattatcagcatagagagaaagccttgtaaccatcaggtagatacagcaccaacggtagtggctctttatgactacacagcgaatcgatcagatgaactaaccatccatcgcggagacattatccgagtgtttttcaaagataatgaagactggtggtatggcagcataggaaagggacaggaaggttattttccagctaatcatgtggctagtgaaacaytgtatcmagaactgcctcctgagrtaaaggagcgwtcccctcctttwagccctkaagraaaaactaaawtggaaaaatctccagcttctcaaaaggtacaatataacaca

SEQ ID NO: 447 - DNA, 1110 bp, Homo sapiens
  SITE (912): n equals a,t,g, or c
  SITE (1034): n equals a,t,g, or c
  SITE (1036): n equals a,t,g, or c
  SITE (1062): n equals a,t,g, or c
  SITE (1079): n equals a,t,g, or c
  SITE (1091): n equals a,t,g, or c
agacaccccggagcagctgtgggaagagctgtgggatcccctattgcatcacaaagcggccctggagggctggtctttattttgatgaggctgagaagggaaggctgcgggcatgtttaatccgcacgctttagactccccggctgtgatttttgacaatggctcggggttctgcaaagcgggcctgtctggggagtttggaccccggcacatggtcagctccatcgtggggcacctgaaattccaggctccctcagcagaggccaaccagaagaagtactttgtgggggaggaggccctgtacaagcaggaggccctgcagctgcactcccctttcgagcgtggcctgatcacagggtgggatgacgtggagagactctggaagcacctctttgagtgggagctaggcgtgaaacccagcgaccagcccctgcttgcaacggagccctccctgaaccccagggagaaccgtgagaagatggcagaagtcatgttcgagaacttcggcgtgcccgctttctacctgtcggaccaggcggtgctggctctctacgcctctgcctgtgtcacgggcctggtggtggacagcggggatgcggtcacctgcactgtccccatctttgagggttactccctgccccacgcagtcaccaagctccacgtggcgggcagggacatcacggagctcctcatgcagctgctcctggccagcggcacaccttcccctgccagctggacaagggtctcgtggacgacatcaaaaagaagctgtgctacgtggccttggagcccgagaaggagctttcccggaggccggaggaggtcctgagggagtacaagctgcccgacgggaacatcatcagcctcggggacccgytgcamcaggcgcccgaggccctgttcgtgccccancagctgggcagccagagccccgggctctcgaatatgggctccaagagcataccaagtgtgataccgacatccagaagatcctctttggggagaatgggcttgtcggggggcactaccctggntncacgggcttggatgaccgggtttttnaaggaacttggaaccancttgggcctccnaaggaacaacccccccatt

SEQ ID NO: 448 - DNA, 411 bp, Homo sapiens
ggcacgagccactgccagctaccggtggtgatcgacaacggctcgggaatgatcaaggcgggcgtggctgggtgccgggagccccagtttatctacccgaacattatcggccgcgccaagggccagagccgcgcggcccagggcgggctagaactctgcgtgggcgaccaagctcaggactggaggagctcgctgttcatcagttacccagtggagcgtggtctcattacttcatgggaggacatggagatcatgtggaagcatatctatgactataacctaaagytgaagccgtgtgatggcccagtcttgattactgagccagcgstgaacccaytggccaaccggcaacagwtcacggaaatttttttgagcatytgggtgttcctgccttctatatgtccatccagg

SEQ ID NO: 449 - DNA, 1498 bp, Homo sapiens
  SITE (172): n equals a,t,g, or c
  SITE (1164): n equals a,t,g, or c
gcttgaatccagtgggattgagaactttctaagagtggtgcggctcttgacaacatgtgggctccaccagcagcaatcatgggggatgggcccaccaagaaggtgggcaaccaggcccccctgcagacacaggccctccagactgcctctttaagggatggcccggcgaagngggccgtgtgggtccgccatacgagttcagagccacaagaacctactgaatcaaaggcagccaaggagaggcccaagcaggaggtgaccaaagcagtggtcgtggacctgggcactggctactgtaaatgtggctttgcsggcctgccaagacccacccacaagatctcaacaacggtgggcaagccctacatggagaccgccaagactggggataatcgcaaggagacattcgtggggcaggaactcaacaacacaaacgttcatctcaagctggttaaccctctgcgacatggcatcatcgtggactgggatacagtgcaggatatctgggaatatctcttccgacaagagatgaagatcgccccggaggagcatgcggtcttggtttcagacccgccactgagcccacacaccaacagagagaaatatgctgaaatgctgtttgaagccttcaacacccctgcaatgcacatcgcctaccagtcgcgcctgtccatgtactcctatggaaggacctccggcctggtggtggaggtgggccatggcgtgtcctacgtggtccccatctacgagggttatcctttgcccagcatcaccggaaggctggactacgcgggctctgacctgacagcctacctgctgggcctgctgaacagtgcggggaacgaattcacccaggaccagatgggcatcgtggaggacatcaagaagaaatgctgctttgtggccctggatcccattgaggagaagaaagtccctctcagtgagcatacgatccgctacgtgctgccggatgggaaggagattcagctgtgccaggaacggttcctctgctcggagatgttcttcaagccatctctcatcaagtccatgcagctgggcctycacacccaaaccgtgtcctgccttaacaagtgtgacatcgccctcaaacgggacctcatggggaacatcctgctctgcgggggcagcacgatgctcagtggcttnccctaaccgtctgcagaaggagctaagcagcatgtgtcccaatgacaccccgcaggtaaacgtgctgcctgaaagagacagtgccgtgtggaccggtggctccatcctggcctcacttcagggtttccaaccattgtgggtccaccgctttgagtacsaggaacacgggcctttcttyctctacagaaggtgcttctgaacggcracgaggatggacactgcactggcagtgcctaccctcgacagggtgagcgcactcctacacacagggggtggagccggcgcttattcctgtagcattaaacacccctcatatgcccctcaaaaaaaaaaa

SEQ ID NO: 450 - DNA, 466 bp, Homo sapiens
  SITE (417): n equals a,t,g, or c
  SITE (454): n equals a,t,g, or c
  SITE (465): n equals a,t,g, or c
gcaagagctgaaaagggtggtgatttggtccagaagaggaagaacttaggctccggaggcagagccaaaggctgaaggggactactccctaggacagaggccgggaggtatcgggccgactaagccgagwggcgcggaggagcggagccttcagccccgcggctgggccgagcccgaaggtggcgtcggtgtcggggagccgccgcgtgcaccggccgtcctccctgggccgcatcgcggtggtggtggaccagggctcgggcttcaccaaggcgggcttcgcgggcgagaaccagccgcgcatagtgctgaagagctttagcctggtgcccagctgggaccggccggtgctgcccggagcgccgggctgcgagctggcgggcggcgtggcgcgggcgcaccccatcaagcacggcngtggtggcggactgggaggcgctggaagggctgtggnagcgcctgctng

SEQ ID NO: 451 - DNA, 1237 bp, Homo sapiens
  SITE (320): n equals a,t,g, or c
  SITE (1225): n equals a,t,g, or c
  SITE (1231): n equals a,t,g, or c
  SITE (1236): n equals a,t,g, or c
aattccgattgcaccacagcactctggcctgggsaacaagagcaagactccatcccccacaacccccccaaaaaataacagacaaaagagaagcagttggagccacgagggtacctttctcctgagagagatccaagtgmgacagaagaagactagagaagagaaccaaagatttatccagtgagaaatacttaccattctgggagggaggagaaagagggccctggaggacttagagagggtccctagagagacakggtaagaacctggacatttctgtgcagaaggagatggttttgaggcagtgggtgaggggtccntgcatytkagaagktccgagtggggtgaattttgtgtggacttcatcttcgacgacacttgtttcattgcgaaggccactgtttgcttcctccctgcatttgccaagacatctaacatatcctgatattgctttttsaggtcagaatgaaggaacgatttccgtagttgaaggagaaacattgtatgtcatagaggaagacaaaggcgatggctggacccgcattcggagaaatgaagatgaagagggttatgtccccacttcatatgtcgaagtctgtttggacaaaaatgccaaaggtgctaagacttatatttaataccataaaaaaaaaaaacttaaaaaaaatggagttgtttctccccacaaccgtgactgttacaggcagttcctcaagagactggctggcaagcaccataatgcacgttctcctgtagtctcacgtggacttcagggtccgggcacctgaattgccttgtctagtttgggctgtaatcaagtttcacttgctgatgaaattttatgtggaaagctgccaaccgccaacttacagctatgtcattcaaaatctgataaacatttcttcttttggcggtatctgtagattaaaaaaaaagttgcattgtagcttctcatctttctgaatttaaaagccggcacgcatcatgcaggtgccaaagacttccctactcttgtttatatctagtatccaccatacactgagctacattaggtggttacagattgtaacttaataaactgaactgtgttagtttgttaaattgtatactcattcacttgggaggaagtcacaagtgaaataacatctccttcttgactaaagcagtaaataagattcttatattggcaaaaaaaaaaaaaaaaraaagggcgcccttttaaagnacccangtttnc

SEQ ID NO: 452 - DNA, 1294 bp, Homo sapiens
  SITE (1078): n equals a,t,g, or c
  SITE (1270): n equals a,t,g, or c
  SITE (1283): n equals a,t,g, or c
ggcggcactcattcactgcacttggtccgagacagaaaacgtttgagttgttccacacacaccccctctaaatgtcgagaagccccaggttgcatgatggaatttgaacattacttcaagaggttttgtattttggattagttaattgggtttgtcctctgctgactgtttcttcggatgcattttttggtgtgctcttgagggattaaatgcaaagagatcacaccatggactacaaggaaagctgcccaagtgtaagcattcccagctccgatgaacacagagagaaaaagaagaggtttactgtttataaagttctggtttcagtgggaagaagtgaatggtttgtcttcaggagatatgcagagtttgataaactttataacactttaaaaaaacagtttcctgctatggccctgaagattcctgccaagagaatatttggtgataattttgatccagattttattaaacaaagacgagcaggactaaacgaattcattcagaacctagttaggtatccagaactttataaccatccagatgtcagagcattccttcaaatggacagtccaaaacaccagtcagatccatctgaagatgaggatgaaagaagttctcagaagctacactctacctcacagaacatcaacctgggaccgtctggaaatcctcatgccaaaccaactgactttgatttcttaaaagttattggaaaaggcagctttggcaaggttcttcttgcaaaacggaaactggatggaaaattttatgctgtcaaagtgttacagaaaaaaatagttctcaacagaaaagagcaaaaacatattatggctgaacgtaatgtgctcttgaaaaatgtgaaacatccgttttkggttggattgcattattccttccaaacaactgaaaagctttattttgttctggattttgttaatggaggggagctttttttccacttacaaaggaaagagaatagctctctgttgcagagaggggtcctggagaaatgggttaccccagttggtcttatttaaatggttacccatcaagattttaattttatcttctcttnggagagcttggtaataagaagcacttaaatcactccaaagaagactttaaaaagggagcagtgaaaaggtcttaataatttattgattgaattaagaaatactagctaattaagaatctgagtctaaacagcacagattttttctttctgcttttaaattgtgttttaaaaaaaaaaaaaaaaaaaaaaaanaaaaaaggaggtngagccagggag

SEQ ID NO: 453 - DNA, 2484 bp, Homo sapiens
  SITE (72): n equals a,t,g, or c
  SITE (992): n equals a,t,g, or c
  SITE (2474): n equals a,t,g, or c
  SITE (2476): n equals a,t,g, or c
tggacattataaaggagcttcctgaaactgtgatagatcttttgaataagtgccttaccttccatccttctnagaggccaaccccagatgaattaatgaaggacaaagtattcagtgaggtatcacctttatataccccctttaccaaacctgccagtctgttttcatcttctctgagatgtgctgatttaactctgcctgaggatatcagtcagttgtgtaaagatataaataatgattacctggcagaaagatctattgaagaagtgtattacctttggtgtttggctggaggtgacttggagaaagagcttgtcaacaaggaaatcattcgatccaaaccacctatctgcacactccccaattttytctttgaggatggtgaaagctttggacaaggtcgagatagaagctcgcttttagatgataccactgtgacattgtcgttatgccagctaagaaatagattgaaagatgttggtggagaagcattttacccattacttgaagatgaccagtctaatttacctcattcaaacagcaataatgagttgtctgcagctgccacgctccctttaatcatcagagagaaggatacagagtaccaactaaatagaattattctcttcgacaggctgctaaaggcttatccatataaaaaaaaccaaatctggaaagaagcaagagttgacattcctcctcttatgagaggtttaacctgggctgctcttctgggagttgagggagctattcatgccaagtacgatgcaattgataaagacactccaattcctacagatagmcaaattgaagtggatattcctcgctgtcatcagtacgatgaactgttatcatcaccagaaggtcatgcaaaatttaggcgtgtattaaaagcctgggtagtgtctcatcctgatcttgtgtattggcaaggtcttgactcactttgtgctccattcctatatctaaacttcaataatgaagccttggyntatgcatgtatgtctgcttttattcccaaatacctgtataacttcttcttaaaagacaactcacatgtaatacaagagtatctgactgtcttctctcagatgattgcatttcatgatccagagctgagtaatcatctcaatgagattggtttcattccagatctctatgccatcccttggtttcttaccatgtttactcatgtatttccactacacaaaattttccacctctgggataccttactacttgggaattcctctttcccattctgtattggagtaggcaattcttcagcagctgcgggaccggcttttggctaatggctttaakgagtgtattcttctcttctccgatttaccagaaattgacattgaacgctgtgtgagagaatctatcaacctgttttgttggactcctaaaagtgctacttacagacagcatgctcaacctccaaagccatcttctgacagcagtggaggcagaagttcggcaccttatttctctgctgagtgtccagatcctccaaagacagatctgtcaagagaatccatcccattaaatgacctgaagtcagaagtatcaccacggatttcagcagaggacctgattgacttgtgtgagctcacagtgacaggccacttcaaaacacccagcaagaaaacaaagtccagtaaaccaaagctcctggtggttgacatccggaatagtgaagactttattcgtggtcacatttcaggaagcatcaacattccattcagtgctgccttcactgcagaaggggagcttacccagggcccttacactgctatgctccagaacttcaaagggaaggtcattgtcatcgtggggcatgtggcaaaacacacagctgagtttgcagctcaccttgtgaagatgaaatatccaagaatctgtattctagatggtggcattaataaaataaagccaacaggcctcctcaccatcccatctcctcaaatatgaagaaccaagagtgtgactgccaaaacttagtgtggcatcagcaccaacagcacagttcttcatatccacgccactctcagacaaaactagatgtccagattgttgcatttccgtaaagtttgtcacgagacattttttaaaatctcataacccacatgttcagttatccatgcaagaaacttgactctacatgtattgctgaaagaattttcttaacagtgaaatctgatcatatatttttaccacactgccacataaagcccaagaaattcagctgacaagacagatttagcattatcaagaaatcccatttgccctgaaaaagctgtcctccattgtactgaacagacagtcctgtcgattgtgttatttagaaacatacactgaatgtgggctgaaatcatcatctttccataatgaaaactgagaaactattcacaatgcattccttataaataaatgctacatttagtaactcaaaaaaaaaaaaaaggggngnccgtttta

SEQ ID NO: 454 - DNA, 1304 bp, Homo sapiens
  SITE (21): n equals a,t,g, or c
  SITE (29): n equals a,t,g, or c
  SITE (31): n equals a,t,g, or c
tatcaagttttttcaagatanggaagatncntgaatattttaaggcaaaagaggaaccagctaataaagaaaataatgaagatgcttgagaggagagagagattggaccaattatcaggtcattaggatgctgtcctacggaaggagagctgcatgatctgattgcagaggtagaggaagaagaaccyactggatacattcgattcgaaaaatttcttccggtgatgacagaaatactactagaaagaaaatacagaccaattccagaagatgtccttcttcgagcttttgaggttttagattcagctaaacgtgggtttcttactaaggacgagctgatcaagtatatgactgaagaaggtgagcctttttctcaagaggaaatggaagaaatgttgtctgctgcaattgatccagaatcaaattcaattaattacaaggactatataacaatgatggtgatagatgaaaattaaatgttctaaagataatttctgattgaaagaacaattttagaaattgcttgttcttgttaatttcacatcttatcttaggattcctatatgtgatatttaataccttgtgacataactattttaagacactttgtttttaaagatgatcgtaacactttaaaccaaatttagtatgtctagccttacagaatgataaattactatttatttaaaaactattcttaaaacattttaacattagaatggattgttgtttattttctacaataaaactcaggtcaccttcgaattaattaagctgacaaaatgaaaatgacttaattacccaaggtttggcatgtaaagatcttaagagggkgcagaacgaaccactcgaaaacgagtagcagtgtaatgaaggcttcttttttaaacaataacaaatgcttcatcaatctgagtgtggaaggtgatttatcaaaataaatattactaattgatttttttatgagtgccaattacaaatatcatttgggataataataacttagtgtaaacatttatatttgctgatccagcatgtcaccatttatggagtagctaaaggagttgagatcattggaactagagaaaagaaggttgagtggaagttgatagtgtaaggtagtggcaattctccctttgtctttagaattctcacccactccgcatatctgtcatgggagcattgtcctgaatactgagtaagaatactgagaaatgttatggtgtgcaaatgtacagctcctgaaagagcaaaatgaagcacaagcagtcacaatggaacaatatatggcatggccactgaaa

SEQ ID NO: 455 - DNA, 1065 bp, Homo sapiens
  SITE (920): n equals a,t,g, or c
  SITE (956): n equals a,t,g, or c
  SITE (1002): n equals a,t,g, or c
  SITE (1045): n equals a,t,g, or c
gaagagaacaaggccagggtcatttttatcacagaatacatgtcatctgggagtctgaagcaatttctgaagaagaccaaaaagaaccacaagacgatgaatgaaaaggcatggaagcgttggtgcacacaaatcctctctgccctaagctacctgcactcctgtgacccccccatcatccatgggaacctgacctgtgacaccatcttcatccagcacaacggactcatcaagattggctctgtggctcctgacactatcaacaatcatgtgaagacttgtcgagaagagcagaagaatctacacttctttgcaccagagtatggagaagtcactaatgtgacaacagcagtggacatctactcctttggcatgtgtgcactggagatggcagtgctggagattcagggcaatggagagtcctcatatgtgccacaggaagccatcagcagtgccatccagcttctagaagacccattacagagggagttcattcaaaagtgcctgcagtctgagcctgctcgcagaccaacagccagagaacttctgttccacccagcattgtttgaagtgccctcgctcaaactccttgcggcccactgcattgtgggacaccaacacatgatcccagagaacgctctagaggagatcaccaaaaacatggatactagtgccgtactggctgaaatccctgcaggaccaggaagagaaccagttcagactttgtactctcagtcaccagctctggaattagataaattccttgaagatgtcaggaatgggatctatcctctgacagcctttgggctgcctcggcccmagcagccacagcaggaggaggtgacatcacctgtcgtgcccccttytgtcaaggacttccacacctgraccagcttaaggtggagactcgcaaggtggtngcttgatgcagtgcaacattggagtccggtggaagnagggagtcaaacaccaactggacacttttggctgaagttggagggncaaactggaccgggaacctgaacttgggaccggtgccaaatgnggaatattcccgagttgcgg

SEQ ID NO: 456 - DNA, 693 bp, Homo sapiens
  SITE (669): n equals a,t,g, or c
ggaaagggaaaacaactacggctgcggtgtggttggtggtgagatgacgaccttagtgctggataatggagcttacaacgccaaaatcggttacagccatgaaaatgtgtcggttattcctaattgtcagttccggtcaaaaacagcacgtcttaaaacttttactgccaaccagatagatgaaataaaagacccttctggactcttttacatcctcccttttcaaaagggctacttggtgaattgggatgttcagagacaagtttgggattacctttttggaaaagaaatgtatcaggttgattttttagatactaatattattatcactgaaccatactttaacttcacttcaattcaagaatcaatgaatgaaattctatttgaagaataccagtttcaagcagtattaagagtaaatgctggggctctcagtgcacataggtatttccgagataatccttccgaattatgctgtatcattgttgatagtggatattcctttacacatatagttccttattgtagaagtaaaaagaaaaaagaagcaattattcggataaatgtgggaggaaaactcttaaccaatcatctaaaggagatcatatcttacaggttgaaaggagragraaatacagtaatgatagrctatgtcttgcctgacttcantacaattaaaaagggcttttgtaa

SEQ ID NO: 457 - DNA, 1492 bp, Homo sapiens
  SITE (166): n equals a,t,g, or c
  SITE (206): n equals a,t,g, or c
  SITE (1416): n equals a,t,g, or c
  SITE (1489): n equals a,t,g, or c
tttttcagggattgtggtccatcaggagtctgtgtgtgccacctatggaagtggcttaagcagcacgtgtattgtagacgttggggaccagaagacaagtgtatgctgtgtggaggatggggtgtctcatcggaatactcggctttgtctggcatacggaggatcntgatgtgtcaagatgtttttactggctaatgcagcgagcntgggttcccttacagagaatgccagttaacaaataaaatggattgtcttcttctgcaacaccttaaagaaactttttgtcatttagatcaggacatctctgggcttcaggaccatgagtttcagattcgacatcctgattctcctgccctgctttaccagtttcgattaggagatgaaaaactgcaggctccaatggctttgttttaccccgcaacttttggaatygttggacagaaaatgacgactttgcagcacagatctcagggcgatcctgaggatcctcacgatgaacattacctgctggccacacagagcaaacaagaacagtctgcaaaagctactgctgaccgaaagtctgcatccaaacctattggatttgaaggggatcttcgtggccagtcctctgatcttccagaaagactccattcccaggaggtagatttggggtctgcacagggagatggcctgatggcsggcaacgattccgaggaggccctcactgcactgatgtccaggaagactgccatctcgctgtttgaaggraaagccctgggcctggataaagccatcctccatagcatagactgctgttcatctgacgacaccaaaaagaagatgtacagctccatcctagtggtgggaggtggtttgatgtttcataaagctcaagaatttctgcagcacagaattctcaacaaaatgccaccatccttcaggcgaattattgaaaatgtggatgtgatcacaaggcctaaggacatggacccccggctgattgcatggaaaggaggggcagtgttggcttgtttggatacaacacaggaactgtggatttatcagcgagagtggcagcgctttggtgtccgcatgttacgagagcgggctgcgtttgtgtggtgaatggggaggaaatgtcactgccgaagaccaaaaacaagcttcttggtataaaagactcttacagaatatgtgtattgtaatttattgatctggatgcttaagtgtcatggacagtaaatgaatttgaactttatgttgaggacatgacattggtttgaaaatataaactgcttttgagcagtttagtcagggcatttgagaataaataggaactttctcttcagttgtaaactctcttgccctctctcagggtctcataaactccccagtgatgtaaacgttgctattgaaggttctcatgtggtgaancccttcatttaagttggcttgaatctcatcagcaggcagcctcatgcaaccatgagggatagtatgtgacgangga

SEQ ID NO: 458 - DNA, 719 bp, Homo sapiens
  SITE (661): n equals a,t,g, or c
  SITE (663): n equals a,t,g, or c
  SITE (685): n equals a,t,g, or c
  SITE (716): n equals a,t,g, or c
  SITE (718): n equals a,t,g, or c
acgccaccagggcagccgagcatttattacccgggcctccacccagcttggcagactttagacttgaggctggaggaaagggaactgaacgcggttctgggagcagcaagcccacgggtagcagccgaggccccagaatggccaagtttctttcccaagaccaaattaatgagtacaaggaatgcttctccctgtatgacaagcagcagagggggaagataaaagccaccgacctcatggtggccatgaggtgcctgggggcagcccgacgccaggggaggtgcagcggcactgcagacccacgggatagacggaaatggagagctggatttctccacttttctgaccattatgcacatgcaaataaaacaagaagacccaaagaaagaaattcttctagccatgttgatggtggacaaggagaagaaaggttacgtcatggcgtccgacctgcggtcaaaactcacgagtctgggggagaagctcacccacaaggaagtggatgatctcttcagggaagcagatatcgaacccaatggcaaagtgaagtatgatgaatttatccacaagatcacccttctggacgggactattgaaggaggagaatgggagagccttccctggcctgaaaacttggagcaattaattttttttaaaaagngntcttttacttgggagagatggnaacacagtggcaagacaacatttcccaactntng

SEQ ID NO: 459 - DNA, 1155 bp, Homo sapiens
tggaagggttcccttcctcctacaagatggtgtgtgaggagccttcaatacgacccggggtgtaaagtgtccaactctagtaggggcctgatggcatccccgccgagtcccaggagagagagagaagaccccttcctggagtccagggctcccgggaagaaacactggcatttgtmcctttgcttcggcttctggaggcagagactctgagcccagggagagccttctgcagccccatttcctcaaaaatccaacctgccaggtggcgggtcatgagctgtgctcagwrgctggaatctgaccytggkggcgtcgggcccagtctycatgggcarccgarcatttattacccgggcctycacccagcttggcagactttagacttgargctkgargaaagggaactgaacgcggttctgggagcagcaagcccacgggtagcagccgaggccccagaatgagtacaaggaatgcttctccctgtatgacaagcagcagagggggaagataaaagccaccgacctcatggtggccatgaggtgcctgggggccagcccgacgccaggggaggtgcagcggcacctgcagacccacgggatagacggaaatggagagctggatttctccacttttctgaccattatgcacatgcaaataaaacaagaagacccaaagaaagaaattcttctagccatgttgatggtggacaaggagaagaaaggttacgtcatggcgtccgacctgcggtcaaaactcacgagtctgggggagaagctcacccacaaggaagtggatgatctcttcagggaagcagatatcgaacccaatggcaaagtgaagtatgatgaatttatccacaagatcacccttcctggacgggactattgaaggaggagaatgggagagcctcccctgggcctgaaaacttggagcaattaattttttttaaaaagtgttcttttcacttgggagagatggcaaacacagtggcaagacaacattacccaactatagaagagaggctaactagcaacaataatagatgatttcagccatggtatgagtagatctttaataaaagatttgtattgattttattaaaaaaaaaaaaaaaaaaaaaaaaaaaaaaaaaaaaaaaaaaaaaaaaaaaaaaaa

SEQ ID NO: 460 - DNA, 781 bp, Homo sapiens
cctacttttttaatgcgatcccaatcattttaaggagttttaaaatggataagaagcaagtaacggatttaaggtcggaactactcgattcacgttttggtgcgaagtctatttccactatcgcagaatcaaaacgttttccgctgcacgaaaattgcscgatgtcgcattycagattatcaatgaygaattatatcttgatggcaacgctcgtcagaacctggccactttctgccagacctgggacgacgaaaacgtccataaattgatggatttgtcgatcaataaaaactggatcgacaaagaagaatatccgcaatccgcagccatcgacctgcgttgcgtaaatatggttgccgatctgtggcatgcgcctgcgccgaaaaatggtcaggccgttggcaccaacaccattggttcttccgaggcctgtatgctcggcgggatggcgatgaaatggcgttggcgcaagcgtatggaagctgcaggcaaaccaacggataaaccaaacctggtgtgcggtccggtacaaatctgctggcataaattcgcccgctactgggaatgtggagctgcgtgraatccctatgggcccccggtcagttgtttatggacccgaaacgcatgattgaagcctgtgaacgaaaacaccatcggcgtggtgccgactttcggcgtgacctacacyggtwaacttatgaagttcccacaaccgctgcacggatgcgctgggataaattccaggccgacaccggtatcgacatcgacatgcacatcgacg

SEQ ID NO: 461 - DNA, 862 bp, Homo sapiens
  SITE (735): n equals a,t,g, or c
  SITE (777): n equals a,t,g, or c
  SITE (810): n equals a,t,g, or c
  SITE (840): n equals a,t,g, or c
gcacgagggagtgccatcagctggcctatgctgatgaagccaagaagcgctctaacccatatgtgaagacttaccttctgcctgacaagtcccgccaaggaaaaagaaaaaccagcatcaagcgggacactgttaatccactatatgatgagacgctgaggtatgagatcccagaatctctcctggcccagaggaccctgcagttctcagtttggcatcatggtcgttttggcagaaacactttccttggagaggcagagatccagatggattcctggaagcttgataagaaactggatcattgcctccctttacatggaaagatcagtgctgagtccccgactggcttgccatcacacaaaggcgagttggtggtttcattgaaatacatcccagcctccaaaacccctgttggaggtgaccggaaaaagagtaaaggtggggaagggggagagctccaggtgtggatcaaagaagccaagaacttgacggctgccaaagcaggagggacttcagacagctttgtcaagggatacctccttcccatgaggaacaaggccagtaaacgtaaaactcctgtgatgaagaagaccctgaatcctcactacaaccatacatttgtctacaatggtgtgaggctggaagatctacagcatatgtgcctggaactgactgtgtgggacccgggagcccctggccagcaatgacttcctgggaaggggtcaggcttggtgntggcactgggatcaggaattgggggaagtggtggactggatngactcgactgggggaagaattgagcctgtgcanaagatgcgacagtccccagggcttgggcanaaggactttggagctccgtcct

SEQ ID NO: 462 - DNA, 1220 bp, Homo sapiens
  SITE (205): n equals a,t,g, or c
gctgactaggacccctcccttctctcctgccctccctccagcccggggagtcccaggcagtgctgtgctgctgtttgaggtggagctggtgtcccgggaggatgggctgcccacaggctacctgtttgtgtggcacaaggaccctcctgccaacctgtttgaagacatggacctcaacaaggatggcgaggtccctccggagganttctccaccttcatcaaggctcaagtgagtgagggcaaaggacgcctcatgcctgggcaggaccctgagaaaaccataggagacatgttccagaaccaggaccgcaaccaggacggcaagatcacagtcgacgagctcaagctgaagtcagatgaggacgaggagcgggtccacgaggagctctgaggggcagggagcctggccaggcctgagacacagaggcccactgcgagggggacagtggcggtgggactgacctgctgacagtcaccctccctctgctgggatgaggtccaggagccaactaaaacaatggcagaggagacatctctggtgttcccaccaccctagatgaaaatccacagcacagacctctaccgtgtttctcttccatccctaaaccacttccttaaaatgtttggatttgcaaagccaatttggggcctgtggagcctggggttggatagggccatggctggtcccccaccatacctcccctccacatcactgacacagctgagcttgttatccatctccccaaactttctctttctttgtacttcttgtcatccccactcccagcccctattcctctatgtgacagctggctaggacccctctgccttcctccccaatcctgactggctcctagggaaggggaaggctcctggagggcagccctacctctcccatgccctttgccctcctccctcgcctccagtggaggctgagctgaccctgggctgctggaggccagactgggctgtagttagcttttcatccctaaagaaggctttccctaaggaaccatagaagagaggaagaaaacaaagggcatgtgtgagggaagctgcttgggtgggtgttagggctatgaaatcttggatttggggctgaggggtgggagggagggcagagctctgcacactcaaaggctaaactggtgtcagtccttttttcctttgttccaaataaaagattaaaccaaaaaaaaaaaaaaaaacctcgggggggg

SEQ ID NO: 463 - DNA, 982 bp, Homo sapiens
  SITE (895): n equals a,t,g, or c
gtctggggcttccaaacccacgatgtcctgcctgacattgtcaccatggctaaagggattgggaatggctttcccatggcagcagtcataaccactccagagattgccaaatctttggcgaaatgcctgcagcacttcaacacctttggagggaaccccatggcctgtgccattggatctgctgtgcttgaggtgattaaagaagaaaatctacaggaaaacagtcaagaagttgggacctacatgttactaaagtttgctaagctgcgggatgaatttgaaattgttggagacgtccgaggcaaaggyctcatgataggcatagaaatggtgcaggataagataagctgtcggcctcttccccgtgaagaagtaaatcagatccatgaggactgcaagcacatgggactcctcgttggcagaggcagcattttttctcagacatttcgcattgcgccctcaatgtgcatcactaaaccagaagttgattttgcagtagaagtatttcgttctgccttaacccaacacatggaaagaagagctaagtaacattgtcagaaataaataaaaccacaagtctcaagaatttgccacgtatgttcaagggtgaatttgaagratttcagaaccactggtatccagagaaagcctgcactctccacaggagctgtwaaagtcatgttgctgctaccaccatatgtgtacagaccctcttacgtgagaatcgatgtcagggaagtcccgtactcgagataatctaatagttagtaggatgtattgatccgttcatgatggtaccagataggatgatttgcatgacttagaactttggggaaaaaagagaaaagatatattgtgttgcgggtcttgttgtgcgtatgcggacagtccatcntgacatctcgttaaccgccctaccgatgacgtcgctcgtgtggggaccccgtcttctccggacggtcccaaacgggctggtgcggtc

SEQ ID NO: 464 - DNA, 618 bp, Homo sapiens
  SITE (525): n equals a,t,g, or c
  SITE (539): n equals a,t,g, or c
  SITE (553): n equals a,t,g, or c
aaagctggagctccaccgcggtggcggccgctctagaactagtggatcccccgggctgcaggaattcggcacgaggtgaaagtggggatccttccagatgagagccatcaggccacggttgcccaccgtggtgataaggtagatcaccaggaacaccaggaacaagggcgcctgcagctctagaagatctgtaagtccttggaggacggagttcataatctgtgtcttatccctcggcagtttagcctttgcagatgcatgcacttcatcttctgtgactcccaagatgttcgtacattttttatctwagaatcatatgatatccctggttgggtgcatgatccagttttatatttttgcttccggtgcaaacacaggaagtttcctcctggtagtgatggcctatgactgttatatggccatatgtaaccctttgctttatcctctagtgatgtccaataccttctgcattcaattatcaggtgtttcatttattattgtttttttcatcctataacgcaagtnggtttgttatttcnattaactttctgcnagtccatgttatacattatttctctgtgatattttacacggtttggaatttcctgtactgaacct

SEQ ID NO: 465 - DNA, 530 bp, Homo sapiens
ggcccagatttattcagtggcaatttttcttggtattaatttggccgcatttatcatcatagttttttcctatggaagcatgttttatagtgttcatcaaagtgccataacagcaactgaaatacggaatcaagttaaaaaagagatgatccttgccaaacgttttttctttatagtatttactgatgcattatgctggatacccatttttgtagtgaaatttctttcactgcttcaggtagaaataccaggtaccataacctcttgggtagtgatttttattctgcccattaacagtgctttgaacccaattctctatactctgaccacaagaccatttaaagaaatgattcatcggttttggtataactacagacaaagaaaatctatggacagcawaggtcagaaaacatatgctccatcattcatctgggtggaaatgtggccactgcaggagatgccacctgagttaatgaagccggaccttttcacatacccctgtgaaatgtcactgatttctcaatcaacga

SEQ ID NO: 466 - DNA, 639 bp, Homo sapiens
  SITE (486): n equals a,t,g, or c
  SITE (568): n equals a,t,g, or c
  SITE (582): n equals a,t,g, or c
  SITE (637): n equals a,t,g, or c
ggaaagaatgctccacgtggtggatggtaaagtcccagatacactcaggaagtgtttctcagagggtgaaaaggtaaactatgaaaagtttagaaattggctttttctaaacaaagatgcttttactttctctcgatggcttctatctggaggtgtgtatgttaccctcactgatgatagtgatactcctactttctaccaaactctggctggagtcacacatttggaggaatcagacatcattgatcttgagaaacgctattggttattgaaggctcaatcccggactggacgatttgatttagagacatttggcccattggtttcaccacctattcgtccatctctaagtgaaggtttgtttaatgcttttgatgaaaatcgtgacaatcacatagattttaaggagatatcctgtgggttatcagcctgttgcaggggacccctggctgaaagacaaaaattttgcttcaaggtatttgatgntgaccgtgatggaagttctcttcaggggttgaactgagagacatggtggttgcacttttagaagtctggaaaggacaaccgnactggatgataatnctggattacatatggaactctctgaaatggagaaagcatactggatgcccatggnct

SEQ ID NO: 467 - DNA, 2635 bp, Homo sapiens
  SITE (568): n equals a,t,g, or c
  SITE (724): n equals a,t,g, or c
  SITE (2629): n equals a,t,g, or c
  SITE (2632): n equals a,t,g, or c
tcgctcttcggacctcaaggttccccttaacacagagcgccccgcagtcttcgcggaaagcgttcggggtaggcgatggctgcgacgcgtgcagggccccgcgcccgcgagatcttcacctcgctggagtacggaccggtgccggagagccacgcatgcgcactggcctggctggacacccaggaccggtgcttgggccactatgtgaatgggaagtggttaaagcctgaacacagaaattcagtgccttgccaggatcccatcacaggagagaacttggccagttgcctgcaggcacaggccgaggatgtggctgcagccgtggaggcagccaggatggcatttaagggctggagtgcgcaccccggcgtcgtccgggcccagcacctgaccaggctggccgaggtgatccagaagcaccagcggctgctgtggaccctggaatccctggtgactgggcgggmtgttcgagaggttcgagacggggaacgtccagctrgcccagcagctgctycactaccatgcaatccaggcatccacccaggaggargcactggcargctgggancccatgggagtaattggcctcatcctgccacccacattctccttccttgagatgatgtggaggatttgccctgccctggctgtgggctgcaccgtggtggccctcgtgcccccggcctccccggcgcccctcctcctggcccagctggcggggganctgggccccttcccgggaatcctgaatgtcgtcagtggccctgcgtccctggtgcccatcctggcctcccagcctggaatccggaaggtggccttctgcggagccccggaggaagggcgtgcccttcgacggagcctggcgggagagtgtgcggagctgggcctggcgctggggacggagtcgctgctgctgctgacggacacggcggacgtagactcggccgtggagggtgtcgtggacgccgcctggtccgaccgcggcccgggtggcctcaggctcctcatccaggagtctgtgtgggatgaagccatgagacggctgcaggagcggatggggcggcttcggagtggccgagggctggatggggccgtggacatgggggcccggggggctgccgcatgtgacctggtccagcgctttgtgcgtgaggcccagagccagggtgcacaggtgttccaggctggtgatgtgccttcggaacgcccattctatcccccaaccttggtctccaacctgcccccagcctccccatgtgcccaggtggasgtgccktggcctgtggtcgtggcctcccccttccgcacagccaaggaggcactgttggtggccaacgggacgccccgcgggggcagcgccagtgtgtggagcgagaggctggggcaggcgctggagctgggctatgggctccargtgggcactgtctggatcaacgcccacggyctcagagacccttcggtgcccacaggcggctgcaaggagagtgggtgttcctggcacgggggcccagacgggctgtatgagtatctgcggccctcagggacccctgcccggctgtcctgcctctccaagaacctgaactatgacacctttggcctcgctgtkccctcaaccctgccggctgggcctgaaatagggcccagcccagcacccccctatgggctcttcgttgggggccgtttccaggctcctggggcccgaagctccaggcccatccgggattcgtctggcaayctccatggctacgtggctgagggtggagccaaggacatccgaggtgctgtggaggccgctcaccaggctttccctggctgggcgggccagtccccaggagcccgggcagccctgctgtgggccctggcggctgcactggagcgccggaagtctaccctggcctcgaggctggagaggcagggagcggagctcaaggctgcggaggcggaggtggagctgagcgcaagacgacttcgggcgtggggggcccgggtgcaggcccaaggccacaccctgcaggtagccgggctgagaggccctgtgctgcgcctgcggragccgytgggtgtgctggctgtggtgtgtccggacgagtggcccctgcttgccttcgtgtccctgctggctcccgccctggcctacggcaacactgtggtcatggtgcccagtgcggctgtcctctgctggccctggaggtctgccaggacatggccaccgtgttcccagcaggcctggccaacgtggtgacaggagaccgggaccatctgacccgctgcctggccttgcaccaagacgtccaggccatgtggtatttcggatcagcccagggttcccagtttgtcgagtgggcctcggcaggaaacctcaaaccggtgtgggcgagcaggggctgcccgcgggcctgggaccaggaggccgagggggcaggcccagagctggggctgcgagtggcgcggaccaaggccctgtggctgcctatgggggactgatgcctgagcgccacctactgcattttggacacctcacaccaaggggagatgcaccccacrgacacctgggactttccccttctggttcctgtgtctcccaataaactctctgaccaaccctaaaaaaaaaaaaaaaaaaaaaaanaanaaa

SEQ ID NO: 468 - DNA, 587 bp, Homo sapiens
acccacgcgtccgatggctgctcgcggaggggcagtgtmcgcggggccgctgtaggctgtccagcgatggatcccaccgcgggaagcaagaaggagcctggaggaggcgcggcgactgaggagggcgtgaataggatcgcagtgccaaaaccgccctccattgaggaattcagcatagtgaagcccattagccggggcgccttcgggcaaagtgtatctggggcagaaaggcggcaaattgtatgcagtaaaggttgttaaaaaagcagacatgatcaacaaaaatatgactcatcaggtccaagctgagagagatgcactggcactaagcaaaagcccattcattgtscatttgtattattcactgcagtctgcaaacaatgtctacttggtaatggaatatcttattgggggagatgtcaagtctctcctacatatatatggttattttgatgaagagatggctgtgaaatatatttctgaagtagcactggctctagactaccttcacagacatggaatcatccacagggacttgaaaccggacaatatgcttatttctaatgagggtcatattaaactgacgg

SEQ ID NO: 469 - DNA, 1600 bp, Homo sapiens
  SITE (859): n equals a,t,g, or c
gggcacgaggcttcatgcgcgtcagcctgctgccggacgagcagatcgtgggcatttctcggatccagagaaatgcctactccatcttctttgatgagaagttctccatccccctggwtcccacagccctggrggrgaagagcctgcggttttytgtatttggcatcgatgaggatgagcgcaacgtcagcacgggggtggtggagctgaagctttctgtgcttgacctcccgctgcagcccttcagtggctggctctatttacaggaccagaacaaggccgccgatgctgtgggggagatctgctctccctcagctacctycccacagccgagcgsctcamcgtggtcgtggttaaggccaagaacctcatctggaccaacgrcaagaccacarcggaccccttcgkcaaggtgtacctgctkcargatkggaggaagatkagcaaaaagaagacagccgtgaagagggatgaccccaacccggtgttcaacgaggccatgatcttctcggtgccagccattgtgctccaggacctgtctctccgcgtgacggtggctgagagcagcagcracggccgtggggacaacgtgggccatgtcatcattgggccgtcagccagtgcatgggaaccacamattggaaccagatkttggccacgctgcgcaggcccgtgtccatgtggcacgctgtccggcgaaactagcaaccagggcgggccagttgggcaatggagctgctggagcccggtacccactcagctctgtctgatgccctctccatagcccagctggagccgtgaacactggggtcccctggcagagtcctcatgacccatcctggtctctctgtccagattncagcagaggagtgggcgtggctctgtgtccagggccccagggtctgctcctgctgaggaccagctgtggctggccagggacagaggactyaaccctgctcctcccggtaggccagctgccgagccgggctatgttctggaacccagtgaatyttgggggccaggsactgtgctaggsaccagcargggtaacamgaagaagacccggcccttagggcatcaggaagactagctcccctgccccggaggatctgctcagtgctgatggcagcccagctgtgtggactcagggggctctgagggctagggaaacaggaagggcctctttgacaaggtaggagctgtgcttggaggggcaggaaaagaactgagcatgtcgcaggcagcgggcccagcctgagcaatggcaggatgtgaacttccccatcgcaaatgcagttctcagcccactgcagtggatacaaggaagggcctttytcggggccggagaagagaccaagrgaccaggcccgggcagcagcctaccggccacgtggaacactggctccggagttattctctgtcaaatctactccccggacctcaaccatggcaagaaccagaggtccaaagaggcccagacccaggtccttgtgctcagtcctgcgcaaaccaggcccagaccctgcaagcatttgttgatgcccttgcaggcccactgggagaaagatgcctcaggcaggtctcagcctgggggtggcag

SEQ ID NO: 470 - DNA, 2016 bp, Homo sapiens
  SITE (37): n equals a,t,g, or c
  SITE (48): n equals a,t,g, or c
  SITE (93): n equals a,t,g, or c
cctactagaactccactgaaacctctaggtgactttngggaaggtacncctgcaggtaccggtccggaattcccgggtcgacccacgcgtccngtcttctgtgagtggcagtgtgatgagtgtttatagtggagactttggcaatctggaagttaaaggaaatattcagtttgcaattgaatatgtggagtcactgaaggagttgcatgtttttgtggcccagtgtaaggacttagcagcagcggatgtaaaaaaacagcgttcagacccatatgtaaaggcctatttgctaccagacaaaggcaaaatgggcaagaagaaaacactcgtagtgaagaaaaccttgaatcctgtgtataacgaaatactgcggtataaaattgaaaaacaaatcttaaagacacagaaattgaacctgtccatttggcatcgggatacatttaagcgcaatagtttcctaggggaggtggaacttgatttggaaacatgggactgggataacaaacagaataaacaattgagatggtaccctctgaagcggaagacagcaccagttgcccttgaagcagaaaacagaggtgaaatgaaactagctctccagtatgtcccagagccagtccctggtaaaaagcttcctacaactggagaagtgcacatctgggtgaaggaatgccttgatctaccactgctaaggggaagtcatctaaattcttttgttaaatgtaccatccttccagatacaagtaggaaaagtcgccagaagacaagagctgtagggaaaaccaccaaccctatcttcaaccacactatggtgtatgatgggttcaggcctgaagatctgatggaagcctgtgtagagcttactgtctgggaccattacaaattaaccaaccaatttttgggaggtcttcgtattggctttggaacaggtaaaagttatgggactgaagtggactggatggactctacttcagaggaagttgctctctgggagaagatggtaaactcccccaatacttggattgaagcaacactgcctctcagaatgcttttgattgccaagatttccaaatgagcccaaattccactggctcctccactgaaaactactaaaccggtggaatctgatcttgaaaatctgagtaggtggacaaatatcctcactttctatctattgcacctaaggaatactacacagcatgtaaaagtcaatctgcatgtgcttctttgattacaaggcccaagggatttaaatataacaaaatgtgtaatttgtgactctaatattaaataagatatttgaacaagctaggaaaattgaatttctgctgctgcttcaaagaaaaagctgccccagagcattaaacatggggtattgttaagaagcaaaatgttcttgtttgccatcatgtgtttcacaccacaattctgtgccacagttaagagggtctggtacccttgcaggacctttgtaggttgtgggaaaaagtcgcagaaagatactcaaagtggagcagggaatggagacagacatcagtgatgataaaaaaaaaaatggaccttaagaaactatttactctgtaatctctaataaaatatggaattccatattagggcaatgagactgaaactactggtgtttttctgccttgagaaaacaaacagttaaaacaagcctcaaatgtattttagtgccacccactggccataggtacaattcagttgttggcttgttttgacttaattctaaaataggtctcaagcctgtatttttatgagtttatttttttaaaaccctgcatatatatgattgtttttcttataactttactatatgaaagcagcataagagtagtcacaaacatgttttgcaacaaagttttaattagaatgtaagttgctcagttatactgttcttcttatgtatgtaaaattttcgtattttgtaaaaacccttagaataaattatcatttgatttaaaaaaaaaaaaaaaaaaaaaaaaaaaaaaaaaaaaa

SEQ ID NO: 471 - DNA, 539 bp, Homo sapiens
  SITE (501): n equals a,t,g, or c
  SITE (504): n equals a,t,g, or c
  SITE (537): n equals a,t,g, or c
  SITE (539): n equals a,t,g, or c
ctcaaggccatggattccaacgggttgagcgatccctacgtgaagttccggcttgggcatcagaagtacaagagcaagattatgccaaaaacgttgaatcctcagtggagggaacaatttgattttcacctttatgaagaaagaggaggagtcattgatatcactgcatgggacaaagatgctgggaaaagggatgatttcattggcaggtgccaggtcgacctgtcagccctcagtagggaacagacgcacaagctggagttgcagctggaagagggtgagggacacctggtgctgctggtcactctgacagcatcagccacagtcagcatctctgacctgtctgtcaactccctggaggaccagaaggaacgagaggagatattaaagagatatagcccattgaggatatttcacaacctgaaagatgtgggatttctccagtgaaagtcatcagagcggaagggttaatggctgccgacgtcactggtaagagatgangcnaatctcctaatgctccagatcaagcagcacacnan

SEQ ID NO: 472 - DNA, 1704 bp, Homo sapiens
tcatgtacagcacacagcagggaggcctcattgtgggcatcatacgctgcgtgcacctggctgccatggacgctaatggctactcagacccattcgtcaagctctggctgaaaccggacatgggaaagaaggccaaacacaagactcaaattaaaaagaaaaccttgaatcccgaattcaatgaggagtttttctatgacatcaaacacagtgacctggcaaagaagtcactggacatttcagtctgggwctatgacatcggcaagtccaatgattacatcggaggctgccagctggggatctctgccaagggagagcgcttaaaacactggtacgagtgtctgaaaaataaagacaagaagatagagcgctggcaccagctacagaatgagaaccacgtgtcaagtgattaggctagtgcccaggtccccatctccatgtcccgggtcccccccagcctgctctagctgcccaccgcaccctgatctctcttctctatgcctacctccccccataccctgctgatctccctgagcctgcctttgagcccccgtcacgttgggcactgctgccwaagactccctcctccctgatgctgggatgtgggctctgaatacagcccctctctcatccckgggatggagcaatggggatggggttggggagacgtttacaaagaggttgatcatttaataacctctcagtttgggtaaattacaaaggttcttcatcatttaggactgtttttagaccctcctagccttgaacacacacatgtacacayacacacacacacacacacacacaccctttcattccctgtgttgtgtctctgtatatccccagttgtcagcagacccggacaatgctgtgagagaagcattggggcacaaatagagcctccgggctcccactgccccctgagatgtacaccctgattgccaggaaaacagactgctgtgttcagtaacacaccctccctgctccaagtgcaccaggatgcaaatgcacagaattcaccaggggcttggacgctctcctctttccgaatgtsacctgtgtgcttcctagcaaarcaaaaacaaacgacaacaacaaaaaacccttcctctgtcaccttttctcctcctccctcttctttcccttccatgatagtagattctctctttctcagcctctcccctctcctttctctccctgcctttcttccctttgcctttctctctctctaaagcagtaacaccgcaaaaacracagcaaaaaaagtgtatgttaacctagcctcacccccttgctctcaccagcctgaccaggaaactgagaaactggcccaaacctgagattccacttgggcccacgcttcttaactgacccactcctcccgttggcagaaccagacattcccagggcttgggccaatggctggcactgccctgagtgcatggcagcatccctcaagctgtgtagatgccccatagaggactctctcatccgtgggctccccgggtgggcacggaggcatttagaagaccagggccatgggtctgaggaagcctcagccaaagcctccagcctttctcctttctccgstcttaggtaaatgaacaagctaccctcctccccaatgccttgratctgtttcatgaytcttttggcatcccatcttctcactcagaaccccctccagtctctctggtctctctt

SEQ ID NO: 473 - DNA, 889 bp, Homo sapiens
  SITE (457): n equals a,t,g, or c
  SITE (531): n equals a,t,g, or c
  SITE (815): n equals a,t,g, or c
  SITE (845): n equals a,t,g, or c
  SITE (861): n equals a,t,g, or c
gctctggataggcaggcacaggggcaccctgtggccgtatcagcttcgccctgggtacctctatggctcggaccagctggtggtgaggatcctgcaggccctggacctccctgccaagractccaacggcttctmaracccctacgtcaagatctacctgctgcctgaccgsaagaaaaagtttcagaccaaggtgcacaggaagaccctgaaccccgtcttcaatgagacgtttcaattctcggtgcccctggccgagctggcccaacgcaaactgcacttcagcgtctatgactttaaccgcttctcgcggcasgacctcatcggccaggtggtgctggacaacctcctggagctggccgagcagccccctgaccgcccgctctggagggacatcgtggagggcggctcggaaaaagcagatcttggggagctcaacttctcactctgctacctncccacggccgggcgcctcaccgtgaccatcatcaaagcctctaacctcaaagcgatggacctcactggcttctnaracccctacgtgaaggcctccctgaatcagcgaggggcggcgtctgaagaagcggaaaacctccatcaagaagaacacgctgaaccccacctataatgaggcgctggtgttcgacgtggcccccgagagcgtggagaacgtggggctcagcatcgccgtggtggactacgactgcatcgggcacaacgaggtgatcggcgtgtgccgtgtgggccccgacgctgccgacccgcacggccgcgagcactgggcagagatgctggccaatccccgcaagcccgtngagcactggcatcagttagtggaggaaaancttttaccagttttanaaaaggaacaaaggctttttaggggaag

SEQ ID NO: 474 - DNA, 836 bp, Homo sapiens
  SITE (3): n equals a,t,g, or c
  SITE (5): n equals a,t,g, or c
  SITE (824): n equals a,t,g, or c
gcntntggtcctcagctttgaccgcttctytcgggatgatgtcattggcgaggtcatggtgccactggcargggtggaccccagcacaggcaaggtacaactgaccagggacatcatcaaaaggaatatccagaagtgcatcagcagaggggagctccaggtgtctctgtcatatcagcctgtggcacagagaatgacagtggtggtcctcaaagccagacacttgccgaagatggatatcaccggtctctcaggtaatccttatgtcaaggtgaacgtctactacggcagaaagcgcattgccaagaagaaaacccatgtgaagaagtgcactttgaaccccatcttcaatgaatctttcatctacgacatccccactgacctcctgcctgatatcagcatcgagttcctcgttatcgacttcgatcgcaccaccaagaatgaggtggtggggaggctgatcctgggggcacacagtgtcacagccagtggtgctgaacactggagagaggtctgcgagagcccccgcaagcctgtggccaagtggcacagtctgagcgagtactaatcctgttcttctctcctctaatccccgggggccaagctggggagggatgtggaggggaaaaagatgacagagaagtggmttccaaacctcattttagttgttagaagaaatttcttacaaaacaattccacaaagaacacctatatgaccacagttgcagatcattcttagcatgatgtttttttttctgtttgcaaggcgttagatcttttattttatttattttttttgaggtggggtttcgtcttgttgccgngttgggtgcaat

SEQ ID NO: 475 - DNA, 1038 bp, Homo sapiens
gacctgacgaggccatggaggacggcgaggagggctcggacgacgaggccgagtgggtggtgaccaargacaagtccaaatacgacgagatcttctacaacctggcgcctgccgacggcaagctgagcggctccaaggccaagacctggatggtggggaccaagctccccaactcagtgctggggcgcatctggaagctcarcgatgtggaccgcgacggcatgctggatgatgaagagttcgcgctgccagctgtaaggaccgggggtctccctcctcactaccgccagacaccccggtggaagcatttagaggggaccacgggagggacaaggcttctctgtccgcccttcacacctccagcctcacgttcacttaggcacatcacacacacactggcacacgcaggcatccatccatccgtcattcattcaaatatttattgagcacctactatgtgcccagccctgttctaggcactgggcattaccatagagaacaaaatagacaaatacatctgccctcatggaaggtgacgttcccaggagagggcacctacacagtcacgcaaacacacactaattcctggcagggcccccagcccctcccctggctgagcagccctgtggctgaaatgactagcagataaacagacccccttctgctccgcttcctcctgcccagccaggcaacaccctcaaccggctccatcacatcctcaggtctcgggaccatggggggctcagaggggagacacacctactgcttcctcagatgggcccctccgcagccccttcccttgctcggggaaagcccccaattctgcccacacccatttatttccttccttccttccttcttttctttccttccttccttcttttttgtttttgcccccaattctgcccatacccatttctttctttccttccttccttcttttttgtttttgcccccagttctgtccacaccccttccctttcctgtcctgtcctttctttctttcttttttgayagagcaagactccgtctcaaaaa

SEQ ID NO: 476 - DNA, 418 bp, Homo sapiens
gaagaggaacggaaagctgaggagaaacaacgtgagacagctagtgttttggtgaattatagagcattatacccctttgaagcaaggaaccatgatgagatgagttttaattctggagatataattcaggtaggaaatgaattttttttttaatcatgaataacctaaatacattgtaatatattagtttctgtagtaatgttgaccattaatttcatatatttacctttgtaaaatgtttcttaaacattacctcatttggactttacaacatacttcagagctgcataggacagttattattactaactaagttctagccaaggaagcttaaactcacacaagttgtaactgtcagcattgcagtgccagaatgggatgcagttatgtgtttttttatttccaaatccagcgttgt

SEQ ID NO: 477 - DNA, 1107 bp, Homo sapiens
acaagagcccttcctgcaggggaacctcaggcttcagagagccgaaaagttgggaggcgtaaccacttacaggccggaagtgtccggggtggacgcattcgggtagccgaagaagtcccaggattgccgaagaagtcccaggatttccgaagcgagccgaagcatcgcgacagttttcagagacagctgatcggttggagctgttgcgccgagcagtcatggcggcggccagagctactacgccggccgatggcgaggagcccgccccggaggctgaggctctggccgcagcccgggagcggagcagccgcttcttgagcggcctggagctggtgaagcagggtgccgaggcgcgcgtgttccgtggccgcttccagggccgcgcggcggtgatcaagcaccgcttccccaagggctaccggcacccggcgctggaggcgcggcttggcagacggcggacggtgcaggaggcccgggcgctcctccgctgtcgccgcgctggaatatctgccccagttgtcttttttgtggactatgcttccaactgcttatatatggaagaaattgaaggctcagtgactgttcgagattatattcagtccrctatggagactgaaaaaactccccagggtctctccaacttagccaagacaattgggcaggttttggctcgaatgcacgatgaagacctcattcatggtgatctcaccacctccaacatgctcctgaaaccccccctggaacagctgaacattgtgctcatagactttgggctgagtttcatttcagcacttccagaggataagggagtagacctctatgtcctggagaaggccttcctcagtacccatcccaacactgaaactgtgtttgaagcctttctgaagagctactccacctcctccaaaaaggccaggccagtgctaaaaaaattagatgaagtgcgcctgagaggaagaaagaggtccatggttgggtagaagaatgtgtatgacaaccacacacagtgaagctcttttttcaaagtaaatttgaagaaatgctacaagtatgagatgagatctaagtaaaggtgttaagatataaaaaaaaaacaaaaaaaaaaaa

SEQ ID NO: 478 - DNA, 549 bp, Homo sapiens
  SITE (34): n equals a,t,g, or c
tcaccctcctggccaattgtgttgcaccttgggnactgaatcacatgagccgtcgactaagccagatgcttctcatgttcctactggcaacctgccttctggccatcatatttgtgcctcaagaaatgcagaccctgcgtgtggttttggcaaccctgggtgtgggagctgcttctcttggcattacctgttctactgcccaagaaaatgaactaattccttccataatcaggggaagagctactggaatcactggaaactttgctaatattgggggagccctggcttccctcatgatgatcctaagcatatattctcgacccctgccctggatcatctatggagtctttgccatcctctctggccttgttgtcctcctccttcctgaaaccaggaaccagyctcttcttgacagcatccaggatgtgggaaaatgagggagtgaaatgagcctagctgccctcagaggagcttctgggctataggtctgtggctgaggaaagcaaaacaaccattttagggctaccatcccccaaaaagggttagatc

SEQ ID NO: 479 - DNA, 335 bp, Homo sapiens
  SITE (219): n equals a,t,g, or c
  SITE (331): n equals a,t,g, or c
ttcagagggacggaatgtggtaagataatgatcwactgtagagccaggatccaggaaaggcagcataagtccacaattttagggctcatgagattggtgtatcttagagggtggtaatggcagtgtagcggtcataagccataacagccaaaagaagcatcagagccagcagtgatgtmwgaagaaawttgtgtggcacaacagccatagaatggactngctgcagacaggtagtkgaggcacttgggtacggtggtgcagatgagcatgagtcatgaggaagtgstgagaggaggtcatgggtttgggctggtgtcagtagatgagagancata

SEQ ID NO: 480 - DNA, 824 bp, Homo sapiens
  SITE (5): n equals a,t,g, or c
  SITE (6): n equals a,t,g, or c
  SITE (15): n equals a,t,g, or c
  SITE (19): n equals a,t,g, or c
  SITE (25): n equals a,t,g, or c
  SITE (110): n equals a,t,g, or c
cctcnnggacctcangctnatctgnaccaccgtacccargatggccttcaactacctgtctggcagcaagtccatttctatggctggttgtgccacacaaattttcttcnatacatcactgcttggctctgaatgctttcttttggctgttatggcttatgaccgctacactgccatttgccaccctctaagatacaccaatctcatgagccctaaaatttgtggacttatgactgccttttcctggatcctgggctctacagatggaatcatttatgctgtagccacattttccttctcctactgtgggtctcgggaaatagcccacttcttctgtgagttaccttccctactaatcctctcatgcaatgacacatcaatatttgaaaaggttattttcatttgctctatagtaatgcttgttttccctgttgcaatcatcattgcttcctatgctggagttattctggctgtcattcacatgggatctggagagggtcgtcgcaaagctttcacgacctgttcctctcacctcatggtggtgggaatgttctatggagcaggtttgttcatgtacatacagcccacatctgatcgctccccaacgcaggacaagctggtgtctgtattctacaccatcctcactcccatgctgaatcccctcatctacagcctccgcaacaaggaagtgaccagagcattcatgaagatctcaggaaagggcaagtctggagagagagttacctcataaactttatgttttgatgtctgctaaattattctcttctaatatccatcaagcttatcgataccgtcgacctcga

SEQ ID NO: 481 - DNA, 1368 bp, Homo sapiens
  SITE (659): n equals a,t,g, or c
  SITE (944): n equals a,t,g, or c
  SITE (958): n equals a,t,g, or c
aatgtctggcagtgggcasagtgggggtgcgggggtgtaggtgccaagcgccatggcttagacccgagattggagtccggccgccccccgacagcagccgcctcctgccccccgtgcgccctaggcgccaccatgtcgggagacaaacttctgagcgaactcggttataagctgggccgcacaattggagagggcagctactccaaggtgaaggtggccacatccaagaagtacaagggtaccgtggccatcaaggtggtggaccggcggcgagcgcccccggacttcgtcaacaagttcctgccgcgagagctgtccatcctgcggggcgtgcgacacccgcacatcgtgcacgtcttcgagttcatcgaggtgtgcaacgggaaactgtacatcgtgatggaagcggccgccaccgacctgctgcaagccgtgcagcgcaacgggcgcatccccggagttcaggcgcgcgacctctttgcgcagatcgccggcgccgtgcgctacctgcacgatcatcacctggtgcaccgcgacctcaagtgcgaaaacgtgctgctgagcccggacgagcgccgcgtcaagctcaccgacttcggcttcggccgccaggcccatggctacccagacctgagcaccacctactgcggctcagccgnctacgcgtcacccgaggtgctcctgggcatcccctacgaccccaagaagtacgatgtgtggagcatgggcgtcgtgctctacgtcatggtcaccgggtgcatgcccttcgacgactcggacatcgccggcctgccccggcgccagaaacgcggcgtgctctaccccgaaggcctcgagctgtccgagcgctgcaaggccctgatcgccgagctgctgcagttcagcccgtccgcaggcccttccgcgggccaggtagcgcgcaactgctggctgcgcgccggggnaytccggctagaanccsggtggttccagccattcctgcagccaagggcactgggccagggcggcgcacgcgcaagargcgcgcttcgagggaatatgcgaagctgccgcgtgctgctgcacatgcgctttttcccttccgcttccctccctttcttcccacgggggartccgcagttgcccttgttcggaatccacgttccccgcgatcccgggagctggaggcgcatgcgcatccgcgattccctgcgaccaggccccgagagggcgagaccagaggggacggaagcattgcgcctgcgcggaactctcagcctctgcgcggagggcgtcccttcccaaccagccgtgggtgccaggttcccggttggaacctgcaataaactcgctgttcctcgcaaaaaaaaaaaaaaaaaaaaaactcga

SEQ ID NO: 482 - DNA, 1092 bp, Homo sapiens
  SITE (1): n equals a,t,g, or c
  SITE (2): n equals a,t,g, or c
  SITE (40): n equals a,t,g, or c
nntcttaatagtcctgtcgggtttcgccacctctgacttnagcgtcgatttttgtgatgctcgtcagggggcggagcctatggaaaaacgccagcaacgcggcctttttacggttcctggccttttgctggccttttgctcacatgttctttcctgcgttatcccctgattctgtggataaccgtattaccgcctttgagtgagctgataccgctcgccgcagccgaacgaccgagcgcagcgagtcagtgagcgaggaagcggaagagcgcccaatacgcaaaccgcctctccccgcgcgttggccgattcattaatgcagctggcacgacaggtttcccgactggaaagcgggcagtgagcgcaacgcaattaatgtgagttagctcactcattaggcaccccaggctttacactttatgcttccggctcgtatgttgtgtggaattgtgagcggataacaatttcacacaggaaacagctatgaccatgattacgccaagctcgaaattaaccctcactaaaggkaacaaaagctggagctccaccgcggtggcggccgctctagaactagtggatcccccgggctgcaggaattcggcacgaggaaataatgttatgctcatgccaactggaataataaagctgattgactttggctgtgccaggcgtttggcctgggcaggtttaaatggcacccacagtgacatgcttaagtccatgcatgggactccatattggatggccccagaagtcatcaatgagtctggctatggacggaaatcagatatctggagcattggttgtactgtgtttgagatggctacagggaagcctccactggcttccatggacaggatggccgccatgttttacatcggagcacaccgagggctgatgcctcctttaccagaccacttctcagaaaatgcagcagactttgtgcgcatgtgcctgaccaggtaagaaactgaaagcaagaggaggaagataaatgcccggagattccaagtggcagacatttccctttcaatttatggcccattaaaagctctgttttggttwtgaaaaaaaaaaaaaaaaaaaaaaaaa

SEQ ID NO: 483 - DNA, 2981 bp, Homo sapiens
gcttggttttctctcattatgccttttgcaacggttatcttttttgtcatgatcctggatttctacgtggattccatttgttcagtcaaaatggaagtttccaaatgtgctcgttatggatcctttcccatttttattagtgctctcctttttggaaatttttggacacatccaataacagaccagcttcgggctatgaacaaagcagcacaccaggagagcactgaacacgtcctgtctggaggagtggtagtgagtgctatattcttcattttgtctgccaatatcttatcatctccctctaagagaggacaaaaaggtacccttattggatattctcctgaaggaacacctctttataacttcatgggtgatgcttttcagcatagctctcaatcgatccctaggtttattaaggaatcactaaaacaaattcttgaggagagtgactctaggcagatcttttacttcttgtgcttgaatctgctttttacctttgtggaattattctatggcgtgctgaccaatagtctgggcctgatctcggatggattccacatgctttttgactgctctgctttagtcatgggactttttgctgccctgatgagtaggtggaaagccactcggattttctcctatgggtacggccgaatagaaattctgtctggatttattaatggactttttctaatagtaatagcgttttttgtgtttatggagtcagtggctagattgattgatcctccagaattagacactcacatgttaacaccagtctcagttggagggctgatagtaaaccttattggtatctgtgcctttagccatgcccatarccatgcccatggagcttctcaaggaagctgtcactcatctgatcacagccattcacatcatatgcatggacacagtgaccatgggcatggtcacagccacggatctgcgggtggaggcatgaatgctaacatgaggggtgtatttctacatgttttggcagatacacttggcagcattggtgtgatcgtatccacagttcttatagagcagtttggatggttcatcgctgacccactctgttctctttttattgctatattaatatttctcagtgttgttccactgattaaagatgcctgccaggttctactcctgagattgccaccagaatatgaaaaagaactacatattgctttagaaaagatacagaaaattgaaggattaatatcataccgagaccctcatttttggcgtcattctgctagtattgtggcaggaacaattcatatacaggtgacatctgatgtgctagaacaaagaatagtacagcaggttacaggaatacttaaagatgctggagtaaacaatttaacaattcaagtggaaaaggaggcatactttcaacatatgtctggcctaagtactggatttcatgatgttctggctatgacaaaacaaatggaatccatgaaatactgcaaagatggtacttacatcatgtgagataactcaagaattacccctggagaataaacaatgaagattaaatgactcagtatttgtaatattgccagaaggataaaaattacacattaactgtacagaaacagagttccctactactggatcaaggaatctttcttgaaggaaatttaaatacagaatgaaacattaatggtaaaagtggagtaattatttaaattatgtgtataaaaggaatcaaattttgagtaaacatgatgtattacatcatcttcaaaaatagatatgatggattctagtgaagaccaaaattacttctgtttactttctatcaggaagcatctccattgtaaatatgtatttacatgtttattacaaagacccaaatgaaaaatttttagtccattttttgcatagcctaaagataaaataggaataaaagttctatatttatggattttctgtatataaaactggtttctaattataacttaagtccattaagtaaaatctgtattgccactttaaatgtaaactaaattatttgggagaaacttcaaccactgatatgagataagcaatgagaatagggaagtgtataacatcacagtttttgatgtattacaaaaatcaaccactctataaaataaattttttttacttttggtaatatttgcaaatgaataattaatttattagggtaaagaacttatataagttstgtccatgttattcatttacttaccatgttcctttaaagtagaatatttcctttcttgttatatatttgacattccaagctgcttatcaagctggtatccaagcagtggtaagctttcatcctttcttagctccataacgttgtgaaacagccagttaagagaatcgtaaataattgtcaactcacagttgaattctctgcctatgtaggtaacttttttctaatttctggaacatatagatatataagaaatatcaaagaataggtagttatttcaaagtttaataagtaaaacttgttcataaacatttgagcaccatgaaatcaaaataccctataactactttctatagtcatatctaatttatatttttttcatttccagttgtaactagatatgtagtaaagtctgaaaagactttacsatagacaataacatgcagttttatcagcaccaaagaatgttgtccaaaagaaactttttaatacctgtctttctatttataacatctgaatattttcattcttatattaagaattttgataagtagattgaatttagtatgagtactattttcttatatataccacaatggcaaacatgtattataaatcatatttttgtcttaccaattttaatatatgaggggttttagaaatttgttgtaagttatttttatattccttgtcttttgcatattttttggccaaaatcttcaatacatattaaaatttttgagtggtgggaaaaaaaaaaaaaaaaaaaaaaaaaaaaaaa

SEQ ID NO: 484 - DNA, 1615 bp, Homo sapiens
  SITE (725): n equals a,t,g, or c
tcgagtttttttttttttttttgtttacatcatattttattttattacagtcaataaatatacttttatatatgaaatcattatagaatacatattttaaggcactaagtctcaaaagtgaaggcacctgttatactttgctctctaatttgacacattaaaacatgasaggtaaatctgccaatttattttgagtttgcaagcttacaatttaatagaataaatcaggtagcttcagaaatcaactaagaaaattaacaggctagagtctgaactaataatcttgacatggtttgattatcacttggtttattctgattactcatttaccttttcatttatgaatctaaactgacaattccacctttagaggtataatagagctattaaccgatgagacacatctactcattctctgtaactctggacatcgcatcttgctttaaaatgcaaatcagtcatgtcttgagcctcttactgagcagtgaatgtgtatccgtgcacattccatttctctttctgctgggattttctttggagtcagtggtgctgtccctaagcagttctatgtgggcttctttcagcatctttgttttgcatggagtattctcagaggtcacactttcggttttggttcccatagcttcttctaaaactgttagaatcctatcaagttggtccaccatgaactttgcatcttcttcagtgaagcacataggtggttntattttaagtacatttctatgaggtccatcggcactgagaagcactcgtttttctttcatcttgtagatgatgtgctgagcttcagctgtggcaggggtccttttcagatggtccttcactaaatcaattccaataaaaaggccaatgcccctaatatctcctatcaaagtgtgtttagccttctgttttttcagtaactcagtgagataattccctactctcttggcatttccttgaaggtcttcattttcaattatatccaggacagccaaaccaacagcacaagatactggatttcctccatacgtattaaaatattccatcccagagctgctgaaggcttctgcaatttctttggttgttaccacacatgccaccgggtggccgttgcccatcggttttcccattgtgacgatgtctggaacaaagtcttcaccatacatctggaagctccagaaatgtttcccaactctgccaaagcccacttgaacttcatcagctataaacacaccccctgcaccgtgtacatattctgccactttctggaagtagcctgctggaggaattatttgtccgccacaactctgcatggattcagcaataaaggcagcaatcttccttccactgttatgagcatcttcaatgattttcttcacttcatctgcataagcactggctgagtctgcatggtcttctctatattttcctctgtaagtatctggagttggtgccacatgtacaaattcttttttgacatcttttcctttctgaaacttatatgggctaatctcaattaaggatgataggtgaccatggtaagcatggtcaagagtgatcacatcctggtggcctctgaactgccgagccaggcgtaaggctaagtcgttgc

SEQ ID NO: 485 - DNA, 994 bp, Homo sapiens
ttttttttttttttttctctcagcaggttccatttatttggccggtgctaagatcagttcaccctgatacctgccctggggggtgggtcacgtgatcattctcatttcacagatgagggctctgtatgtggtggggtgagattggaacccagtctctggttggcgtggctgagtgaaggtgtaaagacatgagcctggcagggaaagggaggggaaccgtctcgttattggttgggcatggccatctgcacaggctcctgtagggcccgggtaaggtggggaatctgatcagggcagggagaagaggagtgagctgtggaagctgccttcagccacagcagacggccacgctgtccactcggccacggctgcctggcctctgccatgccaggcccttgaagtcgcccaactcgcctccacgctctgattggagaagaggcaactcctttccaggagtctttgactaaaggggctccatgcaggcacaatttctagagcgaggtactttccacagtgacggcctcttgccggttgccctgggctgctgttgatttctggctctccaggtcctggatagtgtcagggagcggaagtccctgggtctccgggaggaagaacagcacaaccaggctggaagcaatggagataacgccatagaggagaggaggcagcaggggcagggcttggcggctcatcaggatcaggggacccatcatagcccccagccggcccactgtatgcagaatgccatctgctgtcatccgcactggcgttggaaagagttcagccttgtagatggtgaggcaggttaggcttatcccaaaacatccctttcccagcacagcaaagaccacacgcagggtctgcaaatcttgcggcaccagcatgttggctagaatggcgaggccggccatggcctgggaacccgcctggatggtgcggcggccaaggaaactgagcaagagggcagtggtggcccggcccagctcgtgcc

SEQ ID NO: 486 - DNA, 374 bp, Homo sapiens
  SITE (343): n equals a,t,g, or c
  SITE (346): n equals a,t,g, or c
  SITE (370): n equals a,t,g, or c
tcgacccacgcgtccggccaaatgctactaaatccagttataatcctggggacgtggtatactttgtttgtcggccaggatacaagcctgttgtaccttctcttcccatgttttccgtttgtcaggataataacatgtggacacctcttcaggaggcttgtacagcaaaacaatgtcagcatccaagagaacccataaatggccagatagtcgctgtaaatggatctttttcctatggttcacagattcactattcttgtaatgagggttatcggcttgttggaaaaagaattctatactgtgaactttctactaatgacgaaaaaaaatggactggagtggnggntcccccaccagtataaggattaangtgt

SEQ ID NO: 487 - DNA, 594 bp, Homo sapiens
  SITE (573): n equals a,t,g, or c
  SITE (594): n equals a,t,g, or c
gcggacgcgtgggctcttctaatggctatgtaaacatctctgagctccagacctccttcccggtggggactgtgatctcctatcgctgctttcccggatttaaacttgatgggtctgcgtatcttgagtgcttacaaaaccttatctggtcgtccagcccaccccggtgccttgctctggaagtctgtccactacctccaatggtgagtcacggagatttcgtctgccacccgcggccttgtgagcgctacaaccacggaactgtggtggagttttactgcgatcctggctacagcctcaccagcgactacaagtacatcacctgccagtatggagagtggtttccttcttatcaagtctactgcatcaaatcagagcaaacgtggcccagcacccatgagaccctcctgaccacgtggaagattgtggcgttcacggcaaccagtgtgctgctggtgctgctgtcgtcatcctggcaggatgttccagacaagttaaggccactttcccccagggggctcccggattcagcagtgacctgactttgggtggtagacggcgwgccgtatgctnccgtctatgacgaactgtaan

SEQ ID NO: 488 - DNA, 839 bp, Homo sapiens
  SITE (506): n equals a,t,g, or c
tttttatttttttttttcattttggctgttttattgcgatgcatagctaatgatatgtcatttatcattagctgttatctgacgtaccaaacataaacaaacagtgaagcaggctcaaggctctcacccattctggaaaacagaggaatacgacgataacctttgttcatgcatagaagtggcaaagtatattgcccaagaaattcatttcctgctattaaaccttgaccttcaacaacaaaacgtatcaatgccaattctgggacatgaataataaatgtgaatgtttcattccatcttggactaaaagcattttttttaattacacgagtctgctgcttcatttgatcatttggaacaccaaaaacttctataattactaatgaatcacctttgttagatgatgaatgagtaagaggcaactggataccactgatgagccttattgtaagtgtaattggcataccctcttttatgttacttgggttaaagtatgatttactctntcttaagaaatgtggtttcaaaatatatccagaaccaccattatccaaaaatttcccattttgcagatccatgggcagaccaggggtctggaaatttaaagccaccatttgacaacctatattccaaaattcttggggattaaaattagaagagtctgctcttgttgctttgggatatattctggtaatgaacttcctggtgtgaaaaataaactcatggactcgcaattttgaaagttttcgggcttgtgtctccccaatagaattattttcattaaattgctgatataatcttgaatgttgaaagcttttgaatttctcagctttcgtata

SEQ ID NO: 489 - DNA, 711 bp, Homo sapiens
  SITE (481): n equals a,t,g, or c
  SITE (630): n equals a,t,g, or c
  SITE (650): n equals a,t,g, or c
  SITE (691): n equals a,t,g, or c
  SITE (695): n equals a,t,g, or c
  SITE (703): n equals a,t,g, or c
gctgggctgaagggagctagaggcaaaatgatatctgctgggcttccaggagagatgggatcccctggggaaccaggacctcctggacgtaagggtgtgaaaggagccaaaggcttggcttcattttctacatgtgagctcattcagtatgtgcgagaccgcagtcctggcaggcatggaaaaccggaatgcccagtgcacccaaccgagttggtgtttgccctggaccactcccgggatgtcactgagcaggaatttgagcggatgaaggagatgatggctttcctggtgagagacattaaggtccgggagaacagctgccccgtgggagcgcacatcgccatcctctcctataactcccacgccaggcaccttgtgcgcttctcagacgcctacaagaagagtcaacttctcagagaaattgaaactattccttatgagagatcctctgccagcagggagattggcagagcaatgcggnttatttccaggaatgtcttcaagcggacgcttycgggggcacacacgagaaaaatcgccacatttttcagcagcggtcaagtccgcggatgcccactccatyaccacggcttgccatggaagttcggcgccgcttgaaatcattcccgnggtgatcacttttacaacgngcccttggtcaaggcgcgcatttgcgaatgacgacactggnacanttcaaggnaatagtgg

SEQ ID NO: 490 - DNA, 243 bp, Homo sapiens
gcttttgccatcaagttcaccctcattgacagccaagcacagtatccagttgtcaacacaaattatggtaaaatccagggcctaagaacaccattacccagtgagatcttgggtccagtggagcagtacttaggggtcccctatgcctcacccccmactggagagaggcggtttcagccaccagaatccccatcctcctggactggcatccgaaatgctactcagttttctgctgtgtgcccc

SEQ ID NO: 491 - DNA, 516 bp, Homo sapiens
  SITE (512): n equals a,t,g, or c
cgcccgagcgccggagccccggccccgccccgcgagcgccgagacttgttggccgcggagactgcgaccctcttctctcagtctgccttactaccatgccgctctacgagggcctggggagcggcggggagaagacggcggtcgtgatcgacctgggagaggcctttaccaagtgtggatttgctggagaaactggtccaagatgtataattcctagtgtgataaaaagagctgggatgcctaagcctgtcagagttgttcagtataatatcaatacagaagaattatattcctacctaaaggaattcatccacatactatatttcaggcatctattggtgaatcccagagaccgccgagttgtgattatcgaatcggtattatgtccttctcacttcagagagacactcactcgtgttcttttcaaatattttgaggttccatctgtctttatatcaaataagtaaattgcttttgaaataaaaagagaagcaataaaattcttaccaaanaaaa

SEQ ID NO: 492 - DNA, 325 bp, Homo sapiens
  SITE (317): n equals a,t,g, or c
ggcacgagccaacccagctatggcctatgccaacgaggtgaaacgtgtggtcagcagtgcacaggagaagggcaggaagattgcagccttcttcgctgagtctctgcccagtgtgggagggcagatcattccccctgctggctacttctcccaagtggcagagcacatccgcaaggccggaggggtctttgttgcagatgagatccaggttggctttggccgggtargcaagcacttctgggccttccagctccagggaaaagacttcgtccctgacatcgtcaccatgggcaagtccattggcaacggccaccctnttgcctgc

SEQ ID NO: 493 - DNA, 1076 bp, Homo sapiens
  SITE (665): n equals a,t,g, or c
  SITE (904): n equals a,t,g, or c
  SITE (969): n equals a,t,g, or c
aaatgactctaatctggagacatttgctgagacccttgtgcctggtcacttcckctcccaggatccttgagatgcatcctttcctgagcctaggtacttcccggacatcagtaaccaagctcagtcttcatayaaagcccagaatgcctccatgtgacttcatgcctgaaagataccagtcccttggctacaaccgtgtcctggaaatccacaaggaacatctttctcctgtggtgacggcatatttccagaaacccctgctgctccaccaggggcacatggagtggctctttgatgctgaaggaaacagatacctggatttyttttccgggattgttactgtcagtgttggccaytgccacccaaaggtgaatgcagtggcacaaaagcagctcggccgcctgtggcatacaagcaccatcttcttccaccctccaatgcatgaatatgcagagaagcttgccgcacttcttcctgagcctcttaaggtcattttcttggtgaacagtggctcagaagccaatgagctggccatgctgatggcagggcgcactcaaacaacatagacatcatttctttcagaggagcctaccatggatgcagtccttacacacttggcttgacaaacgtagggayctacaagatggaactccctggtgggacanggttgccaaccaacaatgtgtccagatgtttttcgtggcccttggggaaggaagccactgtcgagattctccagtgcaaacaatcaggaagtkcarctgtkcaccagactgctgccaagctaaagatcagtatattgagcaattcaaagatacgctgagcacatctgtggccaagtcaattgctggatttttccgcagaacctattcaaggtgtgaatggagttgtccagtacccaaangggtttcctaaaggaagccttttgagcttggtgcgagcaaggggaaggccgtgtgcattgcagantgaagttgcagacaggattttggaaaggtttgggctctcactttcctgggggcttccaaaacccacgaatgttcctgcctgacattgtcaccatggctaaaagggat

SEQ ID NO: 494 - DNA, 2278 bp, Homo sapiens
  SITE (2097): n equals a,t,g, or c
  SITE (2246): n equals a,t,g, or c
ttcatgatttcccagcagagcaagttgatgatttgaacctcacttctggagaaattgtttatcttctggagaagatagatacagattggtacagagggaactgtagaaaccagattggcatatttcctgccaactatgtcaaagtgattattgatatcccagaaggaggaaatgggaaaagagaatgtgtttcatctcattgtgttaaaggctcaagatgtgttgctcggtttgaatatattggagagcagaaggatgagttgagtttctcagagggagaaattattattcttaaagagtatgtgaatgaggaatgggccagaggagaagttcgaggcagaactgggattttccccctgaactttgtggagcctgttgaggattatcccacctctggtgcaaatgttttaagcacaaaggtaccactgaaaaccaaaraagaagattctggctcaaactctcaggttaacagtcttccggcagaatggtgtgaagctcttcacagttttacagcagagaccagtgatgacttatcattcamgaggggagaccggatccagattctggaacgtctggattctgactggtgcaggggcagactgcaggacagggaggggatcttcccagcagtgtttgtgaggccctgcccagctgaggcaaaaagtatgttggccatagtaccgaaggggaggaaggccaaagccttatatgatttccgaggggagaatgaagatgaactttycttcaaggctggaratataataacagagctggaatctgtagatgatgactggatgagtggagaacttatgggaaaatctggaatatttcccaaaaactacatacagtttctacagatcagctagaggagaagcttgtctgtgttccttggcacaagaactcacttgaactatcaccttgactatcagatatgtttttgcactattttttttaactgaaaaagaaatatctaagctgtacatggtacactagaattttctgaaagcagaaaacgttcagattttgtagttaattttcattacaatagaaacatgcacatggaaacccatgagctaggattctaccgaggaaaacatctagtgggattagcaaggtgaagggaaagcatctggtggcatggcagcatggggaggctcacacacagaagttgcacgtggacatctgttttaatcagcacaagtgaattaaccatgcttcttcatttttttactttagttaaaaaagaggacatttaatattctacatgctgtaactatcaggacatggttagcaatctcaatttcatttttgatattcaaattaattcttacagcttgagcatatcagccttattaccagagcaaatccttccttcagatgggatagtttactgactagttggagcatttgtaagcacatggtgaaatcagcccctgcccaccaaaataatctttatgttaccaagtgattcccatttgtctaaggatttgaagggggtctaaattggatgtatcttagtctaaagaaccaaaaccatccctgaaatgccttgctaatacaactaatccttccatatatgtgccatacttatttttttcctcagtgtatactttatgttaacagggttattacaaagcacattttctgaatctgcaatcattcctttgacaattactggacccaaaggaaaattcattttctttgcattattccagtaatatataaaaactgtgtcttgttatagtagtacattatgaatcacatataaaatcttacaatacagaacaactgttaagatggaaaacagtgccaaacctccacagctcatttctttgtaatataatcagaatgaaaaataatttaagaggacagaagactggtacttttttgttttattttttctctagcttatccctgcacaattattagagtgaatgaaaaaccactttcctgctttccattgttataaattctaagcttaagataaaagtggttctttacatgactgaatcaattacaatttatgggctagagccaaataggttgaagacaatcatccaaacagatcaatggaatagaatttcattggaaatgtwnaaacacttycccaacaatggtcatgactttcttctgtttttgagaagagtttcawawgctgggrccmcattttarcttttawtgttttttttttcccatkgyccaaaarrtttagcaacaagkggccmmcttttacggggatacccccnggatttttccaaaaagggaaaatttccttggg

SEQ ID NO: 495 - DNA, 514 bp, Homo sapiens
tttttttttttttttttgcctctatgaagagtgtaaggtgtatttcaaagcatagttccagtatcaaaaattgtcttgcattttctcatcagcaggtcagtttgagaaagcacgaacaaagttatagtagttaattttgccttctccatgagagcacatcctgattaactccttaaccaaggagtcatccactgggacgttaagcgattcacagattttaaagaacatgtctctgtccacatatcctgaagcttccttgtcataaatttgaaatgcctcacgaatgttgtctttgcatgagtgatctttcagttgcttctgaattgtgtctattaatgcttccaattcctgcacgcctggatccttttcagtttgcttgctttctgcttctggagcaggcgcttctcgctttcggacatggttctgaattgacgcgagtgcttctggtgaatactgggcagcgttgctctccatgtatttcaaaacatactcgtctgtatcaaggatgatgaac

SEQ ID NO: 496 - DNA, 939 bp, Homo sapiens
  SITE (873): n equals a,t,g, or c
  SITE (902): n equals a,t,g, or c
  SITE (920): n equals a,t,g, or c
  SITE (936): n equals a,t,g, or c
ggattcttgagtcactactttggattcttcaaaggtccttcgattctatgcaatctgggatgatacagacagcatgtatggtgaatgtcggacctacatcattcattactatcttatggatgatacggtggaaattcgagaggtccacgaacggaatgatgggagagatcctttcccactcctaatgaaccgccagcgtgtgcccaaagttttggtggaaaatgcaaagaacttccctcagtgtgtgctagaaatctctgaccaagaagtgttggaatggtatactgctaaagacttcattgttgggaagtcactcactatccttgggagaactttcttcatttatgattgtgatccatttactcgacggtattacaaagagaagtttggaatcactgatttaccacgtattgatgtgagcaagcgggaaccacctccagtaaaacaggagttgcctccttataacggttttggactagtggaagattctgctcagaattgttttgctctcattccaaaagctccaaaaaaagacgttattaaaatgctggtgaatgataacaaggtgcttcgttatttggctgkactggaatcccccatcccagaagacaaagaccgcagatttgtcttctcttactttctagctaccgacacgatcagtatctttgagcctcctgttcgcaattctgggtatcattgggggcaagtaccttgggcaggactaaagttgttaaaccatactctacagtgggacaaccctgttctactatgggccccagtgacttctttcattgggtgcctgttgattgaagtgttttgggtcacccggttcatcaaccctggattacagacgagtatggttttggaaatacngggagagccacgttgccccagtatttcanccggaaggcattcgggtncaatttcaggaacccntgt

SEQ ID NO: 497 - DNA, 599 bp, Homo sapiens
  SITE (578): n equals a,t,g, or c
ttttttttttttttttttttttttttttttttttttgcctctatgaagagtgtaaggtgtatttcaaagcatagttccagtatcaaaaattgtcttgcattttctcatcagcaggtcagtttgagaaagcacgaacaaagttatagtagttaattttgccttctccatgagagcacatcctgattaactccttaaccaaggagtcatccactgggacgttaagcgattcacagattttaaagaacatgtctctgtccacatatcctgaagcttccttgtcataaatttgaaatgcctcacgaatgttgtctttgcatgagtgatctttcagttgcttctgaattgtgtctattaatgcttccaattcctgcacgcctggatccttttcagtttgcttgctatggggagtggagggtaagaagtgggtacatgaaagatggggtaggaacaaagcttttccttggtcccttcatatctgtgtcttcaaatatttcatttcacaagggttcatgatagactttctgcttctggagcaggcgcttctcgctttcggacatggttctgaattgacgcgagtncttctggtgaatactgggcag

SEQ ID NO: 498 - DNA, 884 bp, Homo sapiens
ggcagactgtctgggacagacgctgcccggatccctgcggctgcctgcactctggaccacgagctctgagagcagcaggttgagggccggtgggcagcagctcggaggctccgcgaggtgcaggagacgcaggcatggccggtgagctgactcctgaggaggaggcccagtacaaaaaggctttctccgcggttgacacggatggaaacggcaccatcaatgcccaggagctgggcgcggcgctgaaggccacgggcaagaacctctcggaggcccagctaaggaaactcatctccgaggttgacrgcgacggcgacggcgaaatcagcttccaggagttcctgacggcggcgaagaaggccagggccggcctggaggacctgcaggtcgccttccgcgccttcgaccaggatggcgacggccacatcaccgtggacgagctcaggcgggccatggcggggctggggcagccgctgccgcaggaggagctggacgccatgatccgcgaggccgacgtggaccaggacgggcgggtgaactacgaggagttcgcgaggatgctcgcccaggagtgaggctccccgcctgtgtccccctgsstgcgctctgagccttcagggccaccgcccgctgctgcttttgtgctgggactctccggggaaacctggtcggtggatgggaaactgcctccccctgggaggaaggctttgcgctccggggcctggatgcggcgccctcgggccgcctgcgagcccctctctgcctccagaccttgggcagaaggaggcctccttgggcctggtccccctttgccctgcagtggaatgagggcccctcagccccgcattgatctaaataaaggactgccgagttcaaaaaaaaaa

SEQ ID NO: 499 - DNA, 1084 bp, Homo sapiens
  SITE (989): n equals a,t,g, or c
  SITE (1014): n equals a,t,g, or c
  SITE (1032): n equals a,t,g, or c
  SITE (1059): n equals a,t,g, or c
  SITE (1066): n equals a,t,g, or c
gaaagatggcggcggctgcgggtagctgcgcgcgggtggcggcctggggcggaaaactgcgacgggggctcgctgtcagccgacaggctgtgcggagtcccggccccttggcagcggcagtggccggcgcggccctggcaggagcaggagcggcctggcaccacagccgcgtcagtgttgcggcgcgggatggcagttttacagtctccgcacagaaaaatgttgaacatggaataatatatattgggaaaccgtctcttcgtaagcagcgcttcatgcagttttcttcactcgaacatgaaggagaatattatatgacaccacgagacttcctcttctcagtgatgtttgagcaaatggaacgtaaaacttcagtcaagaagctgacaaaaaaggacatcgaggatacactgtcagggatccaaacagctggctgtggatcaacttttttcagagaccttggcgataaagggctaatttcatataccgagtatcttttcttgcttacaatcctcactaaaccccattctggatttcatgttgcttttaaaatgctggatacagatggtaatgagatgattgaaaaaagggaattttttaagctgcagaagatcataagtaaacaagatgacttgatgacagtgaaaactaatgaaactggatatcaggaagcaatagtgaaagaacctgaaattaacacaactcttcagatgcgtttctttggaaaaagaggacaaagaaaacttcattataaagaatttcgaagatttatggaaaatttacaaacagagattcaagaaatggaattccttcagttttctaaaggtttgagtttcatgagaaaagaagactttgcagagtggctactttttttcactaacactgaaaataaaggtatttattgggaaaaatgtgagrgrggaagttgtcagcaggggagggccttagtttggggtggattccagtccttttgcccttttaccacccgntgggagactttgctattgccctgcnggtgttccgtttagctcntctcccgttccgactggccgggttttngggggcngtggaagtggccaccggg

SEQ ID NO: 500 - DNA, 1660 bp, Homo sapiens
aattttttttttttttttttttttttcagcgtctctgaaaattttaatttgttctgacaacgaaactaacacagcataaggacttaagccctcaagctaggcaagacactgatggcccttggagaaagcaccagggcagctggcaggaggcgctaagatggattcttggtgggaaaggaatgaggcacacacataaaccgtgggaaagacttaggtgtcagggcccaagccagaagagggataaggatggactgttccagccttagtctgtgcttaaaaagacagaaatgcccttctctggaattatgagggagaggtctgagggaagggaggcaggcagcttactacttgccctttcactgacctatagcatctgaggcatctgagagcaaagttaaatagaatgaggctggtcgcaagcactgggaagaggtggcggtcctcgggtttaaggagccaaaccctgggcttggaattcagctcccagggccagagcagcatctctcttctgcggaggaggtcacctgagctcacaggactgggaatgtcggctttggaccctcctgatccctggttgttgagattcccttgtgtctcaaaagccttggagcagtgaagtatctctccaggattttctttcccaatcagtcagcagtcaactttcctggaagaatgtcctttctacccaatctkcccaggagggcgggaatgtggccggccctcaggaagggcctctgggtggcctctgcatccctggctggagaatgcgcacagtttgcagaggctcagaactcccaatcgtccacctccagctcttccaggtttgttaccaggccaaagattccactgtggtcctgagactggctgccctcaaaattggtgatgggggtgacaggacgaagcaattcgggcaaagcctctgaggcacgtcgcttgatctgcttgaagaaagagtggttcaggagggtgctggcactgggcctggcatccgggttgcgctgaaggcactgctccacaaagtggtggaagtggggggagaaggttcggtggtaggggtgggagggcgagtcaccgttggagggccggggggtgctggtggtcaggctgtcactcaggccagagttggccactgagcgcgaagggctcatggtcagctcctcagcggggatggtgctggtatccaacaggcagggcactgtgccgttcagtttctctagcagcatctgggtggcaggcatatccttaaaggggacatggccgttggccagttcacaggctgtgattcccacactgtagatgtcagacttggcatcataaccctggagattctgctggaggacctcggggctgagccacggcagaaccttgacactgtacttgggaaaatcgtggaccactcgctgccgctgcccatggcttatcatgctgaggttgctgcgcaaaccagacaggtagaccttcccatccacagagatcaggatgtggctggctttgacactcctgtgtacatatcccatgtggtggatgtagtcgagggccttcagcaccccctgcaggatgtaagcaatcgccagctcattcatgccatccatgaagtgtgtacagatgagatcttttgcagaaccgtatgccatgaatgatgtgaaaacccacagcttat

SEQ ID NO: 501 - DNA, 1662 bp, Homo sapiens
  SITE (1): n equals a,t,g, or c
  SITE (19): n equals a,t,g, or c
  SITE (26): n equals a,t,g, or c
  SITE (32): n equals a,t,g, or c
  SITE (57): n equals a,t,g, or c
  SITE (1571): n equals a,t,g, or c
  SITE (1634): n equals a,t,g, or c
  SITE (1652): n equals a,t,g, or c
naattaacttatcccgttngccgcanccgaangccgaagcccagcgaatcaattaancagaaagcggaagagcgcccaatacgcaaaccgcttttcccgggcgttggccgattcattaatscagttggcacgacaggtttccccgaytgaaagcggcartkagcgcaacgcaattaatgtragttagctcactcattaggcaccccaggctttacactttatgcttccggytcgtatgttgtgtggaattgtagcggatamcaatttcacacaggaamcagctatgaccatgattacgccaagctcgaaattaaccctcactaaagggaacaaaagctggagctccaccgcggtggcggccgctctagaactagtggatcccccgggctgcaggaattcggcacgagctcgtgccgcgcggccgcgttacagcctgttggcggagatcgggcgcggcagctacggcgtggtttatgaggcagtggccgggcgcagcggggcccgggtggcggtcaagaagatccgctgcgacgcccccgagaacgtggagctggcgctggctgaattctgggccctcaccagcctcaagcggcgccaccagaacgtcgtgcagtttgaggagtgcgtcctgcagcgcaatgggttagcccagcgcatgagtcacggcaacaagagctcgcagctttacctgcgcctggtggagacctcgctgaaaggagaaaggatcctgggttatgctgaggagccctgctatctctggtttgtcatggagttctgtgaaggtggagacctgaatcagtatgtcctgtcccggaggccagacccagccaccaacaaaagtttcatgctacagctgacgagcgccattgccttcctgcacaaaaaccatattgtgcacagggacctgaagccagacaacatcctcatcacagagcggtctggcacccccatcctcaaagtggccgactttggactaagcaaggtctgtgctgggctggcaccccgaggcaaagagggcaatcaagacaacaaaaatgtgaatgtgaataagtactggctgtcctcagcctgcggttcggacttctacatggctcctgaagtctgggagggacactacacagccaaggcggacatctttgccctgggcattatcatctgggcaatgatagaaagaatcacttttattgactctgagaccaagaaggagctcctggggacctacattaaacaggggactgagatcgtccctgttggtgaggcgctgctagaaaacccaaagatggagttgcacatcccccaaaaacgcaggacttccatgtctgaggggatcaagcagctcttgaaagatatgttagctgctaacccacaggaccggcctgatgcctttgaacttgaaaccagaatggaccaggtcacatgtgctgcttaaaattcagggctaagcattttgggtgattttaaactaggtcgattcctcgggamccacagtctcaccacgtctcctccagaggacggmagarggtacagtggtggctggccgttgcgatctcccacagytggatccgcaatgngaactttkgttgggtttcccttcttttartttgcttaattttcctttctttctttttttttcncttccttttaattaaccntggacttaaa

SEQ ID NO: 502 - DNA, 728 bp, Homo sapiens
  SITE (694): n equals a,t,g, or c
  SITE (709): n equals a,t,g, or c
  SITE (716): n equals a,t,g, or c
tccatgctgaagaggctggctcgagaccagctcatctatctgctggagcagcttcctggaaaaaaggatttattcattgaggcagatctcatgagccctttggatmgaattgccaatgtctccatcctgaagcaacacgaatagacaagctatacaaggtggagaacaagccagccctcagctccaatgaacaattgtgcttcttggtcagaccccgcatcaagaatatgcgatacattgccagtcttgtcaatgctgacaaattggctggccgaactcgcaaatacaaagtgatcttcagccctcaaaagttctatgcgtgtgagatggtgcttgaggaagagggaatctatggagatgtgagctgtgatgaatgggccttctctttgctgcctcttgatgtggatctgctgagcatggaactaccagaatttttcagggattactttctggaaggagatcagcgttggatcaacactgtagctcaggccttacaccttctcagcactctctatggaccctttccaaactgctatggaattggcaggtgcgccaagatggcatatgaattgtggraggaacctgggaggaggaggaggatggscgaaaccaagggsccgacggaaggatttggacatatctttctcyttggacagargatgtgggatttgtggacagcattttgttcccaatngttttttgaggggcntgttagntgacacttccgc

SEQ ID NO: 503 - DNA, 329 bp, Homo sapiens
  SITE (292): n equals a,t,g, or c
cggcaatttcagctttgggtatgccctggtctacacatcccctgtcatcccagccctggagcgctccttggatcctgacctgcatctgaccaaatyccaggcatcctggtttgggtccgtgttcamcctgggagcarcggccggargcytgartgccatgatyctcaacgacctcctgggccggaagctgagcatcatgttctcagctgtgccgtcggcggscggctatgcgctcatggcgggtgcgcacggcctctggatgctgctgctcggaaggacctgacgggcttcnccggggggctcacagctgcctgcatcccggtgttact

SEQ ID NO: 504 - DNA, 1593 bp, Homo sapiens
  SITE (4): n equals a,t,g, or c
  SITE (26): n equals a,t,g, or c
cagnaatttttttttttttttttttnaaactgctttactatactttattgatataaatacagcaaatctcaataagcaccagctaccattttaccactacacaagagaaacaaagtcaaaagaattatatattaatgcaaagagtaaacacagaatgctttcacttccactatagtcctctataacaaaacatcctacatactttgtacaatttgcttataattggttaaatatttgatatgaagcaaggttgatttttaatcaaacttctatttctcagtggaaaatgctctcttcatcagaggtggttgagttttcccgacatcaaacatcatttccaaaggtgggttattgagagaacaccaatcaggtatacggcccgtctgattataatattcctttgaaacagaacggctcccaagtatatcttgtaatgctccaaaaatagcccctcccaaccaggccacacaattagcttttgcaggtggagtatgaattcgaaatgtcttagtgccaagtgcttttttatattttggtttttctaccaaataccttatttctgcaagcaatctgtggagaaatcctggcaacatagaagtgccacctatgactaccaaattctctgctagttgcttcctggtgtctatcggacactgtataagggaatccaatattaaagtggcaactgattgctcttcattatcttgttcaaaaagaatttccacaactgaatctctgattgatccaaggatatgtaaaatcttctctccatctaatggatagtcaacatttgggggtggggagggacgctcattattcccatcaatattaaattttgctgcttggatttttagtcctcgcttcagatcacttacaaagcaagtacgcgctttaatgtcctctaagacaccttccggaactgaacccatcactgagggaaggctctgttctttagcaacacttgtgtcaacagtacattgttccaatagttgagtttccaactctttgtgaagagcttttcctcctaggggtagtgctccccaacaatttagaactgggattccttcatatatgggtaacaccaggctttccctatatccacaatctaggaccatggcagaattaattccaagcgtcagaagagccattagatgacttggagcaagcaagacagatggaacctcaaaatatttgaaaagaacacgagtgagtgtctctctgaagtgagaaggacataataccgattcgataatcacaactcggcggtctctgggattcaccaatagatgcctgaaatatagtatgtggatgaattcctttaggtaggaatataattcttctgtattgatattatactgaacaactctgacaggcttaggcatcccagctctttttatcacactaggaattatacatcttggaccagtttctccagcaaatccacacttggtaaaggcctctcccaggtcgatcacgaccgccgtcttctccccgccgctccccaggccctcgtagagcggcatggtagtaaggcagactgagagaagagggtcgcagtctccgcggccaacaagtcccggcgctcgcggggcc

SEQ ID NO: 505 - DNA, 1325 bp, Homo sapiens
gcggccgccgaggatggggaaatccaacagcaagttgaagcccgaagttgtggaggagctgaccaggaagacctactttaccgagaaggaggtccagcagtggtacaaaggcttcatcaaggactgccccagtgggcagctggatgcggcaggcttccagaagatctacaagcaattcttcccgttcggagaccccaccaagtttgccacatttgttttcaacgtctttgatgaaaacaaggacgggcgaattgagttctccgagttcatccaggcgctgtcggtgacctcacggggaaccctggatgagaagctacggtgggccttcaagctctacgacttggacaatgatggctacatcaccaggaatgagatgctggacattgtggatgccatttaccagatggtggggaataccgtggagctcccagaggaggagaacactcctgagaagagggtggaccggatctttgccatgatggataagaatgccgacgggaagctgaccctgcaggagttccaggagggttccaaggcagacccgtccattgtgcaggcgctgtccctctacgacgggctggtatagtcccaggctggagctggatgcctgggaaccactcacctccttctgtgccatgaggccacctcagccctgacaccaaccccgtgcgtccacccagccttcttccgcatccacacacagccggctgcccttgacccgggaggccccggctctcctctcccctgtcctgcacccatcccccgcctgaagccaccggctccaattgccagcaacctctgcttgtccggaaaacgacaacacgaaatggaaaaggctacagccctctgcataaaccaaggacttggctgcctcgcaggcagcctccgttcctcccgctctcttgcgcgtgtgcttttgttttttattttgaacagacgttttaaaagaaaaaaaaacaactaccttctgtcctagaagacacagactgacagatggggtgaaggcctggggacctcagagaactctgccttgccctcgtccctcgtccttcggcagccggagaggctgtgggtgggccgagggtgtctaggggttctgcctrgtcaacgttatttgtcgtcccatcttttggcagcaaaaccacctgcgtggctaggatgattaattatgaggatgatgattttttttgtgataacagtattgtgctttttgtggggaaagtgaggttttttttttatatacatatataattgatatctttaatttattggttgttaactgttgctgctgcctggtgtgtcctcagctcccaggctgcgggccc

SEQ ID NO: 506 - DNA, 567 bp, Homo sapiens
  SITE (528): n equals a,t,g, or c
  SITE (556): n equals a,t,g, or c
gattggacagttttcactgttggcagctggctttgggttatttctccatttatggcctatggttcagcaagtcaactcttgaggacctattttcctgaaggaatgagtgaactttaataagaaacattctctttggagccgtgagagggttgaactatctgcaccaaaatggctgtattcacaggagtattaaagccagccatatcctcatttctggtgatggcctagtgaccctctctggcctgtcccatctgcatagtttggttaagcatggacagaggcatagggctgtgtatgatttcccacagttcagcacatcagtgcagccgtggctgagtccagaactactgagacaggatttacatgggtataatgtgaagtcagatatttacagtgttgggattacagcatgtggaattaagccagtgggcaggtgccttttccaggacatgcattagaactcagcttggkacagctctgttgcaacaagatcctgagaaaaggcccttcagcaagcagtttattgtncccatgttttcttcaaacagttgaaagnagaaagccagg

SEQ ID NO: 507 - DNA, 484 bp, Homo sapiens
  SITE (475): n equals a,t,g, or c
  SITE (476): n equals a,t,g, or c
tgcaaccagaagatctaataagaaactgccttttaatcgatcctcttctgacatggatcttcagaaaaaacaaagtaacttggcaactggactctcaaaagccaagagtcaagtttttaaaaatcaagatccggtgctaccccctcgtcccaaaccaggacaccctctctacagtaaatacatgctgtctgtgcctcatggaattgccaatgaagatattgtctctcaaaaccccggagaactctcttgtaagcgtggggatgtacttgtgatgctgaagcagacggaaaataattacttggagtgccaaaagggagaagacactggcagagttcacctgtctcaaatgaagattatcactccacttgatgaacatcttwagaagcagaccaaacgatccaagccacgctcagaagcctgttgacagtggtgctcctcatgctgtcgttcttcatgattttcccagcagagcaannggatgatt

SEQ ID NO: 508 - DNA, 1023 bp, Homo sapiens
  SITE (18): n equals a,t,g, or c
  SITE (145): n equals a,t,g, or c
gggtacgccgtgcaaggntaccggggtccggaattcccgggtcgacccacgcgtccgcgggactcagcgggttctcctggataacgtcctgtcggaagaacagtgccgggagctccacagcgtggccagtggaatcatgcttgtnggtgatggatacagaggaaaaacttcaccccatacacccaatgaaaagtttgaaggtgcaactgtcctgaaagcactcaaatctggttatgaaggtcgagtcccactgaagagcgctcgtctgttttatgacatcagcgaaaaggctcgaaggattgtagaatcttattttatgctgaactcaactctgtatttttcctatacacacatggtctgccgaacagccctgtctggtcagcaggatagaagaaatgacctcagtcatcccatccatgctgacaactgtttgttggatccagaggccaacgaatgctggaaggagcctcctgcttacacatttcgagactatagtgctctcctatatatgaatgatgactttgaaggaggagaattcatattcacagagatggatgctaagactgtgactgcctctataaaaccaaaatgtgggcgcatgatcagcttctcatctggaggagagaaccctcatggggtgaaggcagtcaccaagggaaagaggtgtgctgtggctctgtggttcaccttggacccactttatagagaattggagcgaatacaggctgatgaagtgattgcaattctggatcaagaacagcaagggaagcatgaactgaatatcaaccctaaagatgagctataaaaatgagaaagaatgttctatcaaatatttatttaaattgttaatcttatgagaacctttttatttttgtacagagccatggtataaattaacaggttaatgtcagtcatcagatcttccttctcttcctaaggatgcttgtgttgcctcaatctatcaatctatctttcttgttttgggktgktttctctctctctctctctctctctcgtcctaaa

SEQ ID NO: 509 - DNA, 541 bp, Homo sapiens
  SITE (521): n equals a,t,g, or c
  SITE (532): n equals a,t,g, or c
ctccgacgccccgggcaagagaacgccaggagggataacgggaggaaggccggccggggccgccaaggcagtcccaggctcgcgtaggaggcgcgcagaccttgcaccttgcaccttcgcagcgccctgcaccccgccaccatgtgcgagctgtacagtaagcgggacactctggggctgaggaagaagcacatcgggccctcatgcaaagttttctttgcatcggatcccatcaaaatagtgagagcccagaggcagtacatgtttgatgagaacggtgaacagtacttggactgcatcaacaatgttgcccatgtgggacactgtcacccaggagtggtcaaagctgccctgaaacagatggaactgctaaatacaaattctcgattcctccacgacaacattgttgagtatgccaaacgcctttcagcaactctgccggagaaactctctgtttgttattttacaaattcaggatccgaagccaacgackagccttacgctggctcggcatttcagangccactaggangtgatcaat

SEQ ID NO: 510 - DNA, 956 bp, Homo sapiens
aacaaaagctggagctccaccgcggtggcggccgctctagaactagtggatcccctgggcattatggaacacggcgcataacgtcggcggcgcactcattcccattgtgatggcagcggctgcgctgcattacggctggcgtgccgggatgatgattgctggttgtatggcgatagtcgtggggatttttctctgctggcggctacgcgatcgcccgcaggcgttaggtttaccggcggtcggtgaatggcgacacgacgcgctggaaattgctcaacaacaagaaggggcagggttgacgcgtaaagagatcctcaccaaatatgtgttgctgaatccgtatatctggctgctttcgttttgctatgtgctggtctatgtggtccgggcggcgatcaacgactggggcaatttgtatatgtccgagacactgggcgtcgatctggtcacggcgaatacggcagtgacgatgtttgaactgggcggatttatcggtgcgctggtagccggttggggctcggacaaattgtttaacggcaaccgagggccgatgaatttgattttcgccgccggaattttgctttcagtcggctccctgtggctgatgccatttgccagctacgtgatgcaggcaacctgcttcttcaccattggtttttttgtctttggcccacagatgttaatcggtatggcggcggcagagtgttcccacaaagaggcggcaggggcggcgacggggtttgtcggcttgtttgcttatctgggggcgtcgcttgctggttggccgctggcgaaagtactcgatacctggcactggagcggattttttgtggttatctctatcgccgccgggatttccgcactgctgttactgccctttttgaacgcccagacaccgcgcgaagcgtgatgcatctcaccttttcacttcatatccggcaaaactaagaaatttt

SEQ ID NO: 511 - DNA, 1697 bp, Homo sapiens; identical to SEQ ID NO: 220
  SITE (1666): n equals a,t,g, or c

SEQ ID NO: 512 - DNA, 375 bp, Homo sapiens
gggcccgtcaagctgcgcctgacagtactctgtgcaaaaaacctggtgaaaaaggattttttccgacttcctgatccattwgctaaggtggtggttgatggatctgggcaatgccattctacagatactgtgaagaatacgcttgatccaaagtggaatcagcattatgacctgtatattggaaagtctgattcagttacgatcagtgtatggaatcacaagaagatccataagaaacaaggtgctggatttctcggttgtgttcgtcttctttccaatgccatcaaccgcctcaaagacactggttatcagaggttggatttatgcaaactcgggccaaatgacaatgatacagttagaggacagatagtagta

SEQ ID NO: 513 - DNA, 1285 bp, Homo sapiens
  SITE (1261): n equals a,t,g, or c
  SITE (1262): n equals a,t,g, or c
  SITE (1267): n equals a,t,g, or c
  SITE (1268): n equals a,t,g, or c
  SITE (1283): n equals a,t,g, or c
tgtgtggcacccagatcacgctgtggttatctgcagttcctttktagtattgtacaaagtttcttgaagatttttaaatacataagtttaaaagagaattaactttcaatttgcaaattaaaatgagaatggttgccttttcttcattatcaagagatggtgagttgtcctcctgtaagtaaattggttcttttctttctaatattgtgttccttgaaaccttactctagtatgcagggagagtggagggtgcctaagtgtaaaataattaaaacttaagctgatataattatcaataatagtaaccagttctgatatctacttgataccataacggtgagcattgatagactttcatagatttttacataagattagcttgagcaagttttcctcttttgtaggtactggggggaaaattctggaaaaatttttagagagttctttctaaaatgtcgaaatgcaaagctgtataaattgctgttgacgttagctgtctgaccaggaagtactctctttaagcctcacttaaaaaactaagtgtctgtaataacttcctttctcgggatgaaggtgctgatagcctggggtgttcttataacttaagttcagttttttctttcctgtgaggaagaggcagttttttaaatgaagccatctctggggaaatcgtattgattgttgtagctaaatacggaatttttaaagtctttagtatgttgaactggaaatataggacatgcgtttgagatctactgttgcatcataaatacaaaggactgaagttataaaagagaaaagagaagtttgctgctaaaatgaatctgagcaatatggaatattttgtgccacacacaaaaaggtactgaagatttaccccccaaaaaaaattgtcaatgagaaataaagctaactgatatcaaaaagcagagcctgctctactggccatcatgcgtaaaggggtgctgaaggacccagagattgccgatctattctacaaagatgatcctgaggaactttttattggtttgcatgaaattggacatggaagttttggagcagtttattttgctacaaatgctcacaccaatgaggtggtggcaattaagaagatgtcctatagtgggaagcagacccatgagaaatggcaagatattcttaaggaagttaaatttttacgacaattgaaagcatcctaatacttattgggagtaccaaaggcttggttactttggaaaggaaccaccaacttggcttgggnnttggnnggaatggggaaaatnaa

SEQ ID NO: 514 - DNA, 4607 bp, Homo sapiens
  SITE (1): n equals a,t,g, or c
  SITE (5): n equals a,t,g, or c
  SITE (51): n equals a,t,g, or c
  SITE (52): n equals a,t,g, or c
ngccnctggcagtcggtcaaagtgtatcatatgccaagtcgccccctattnncgtcaatgacggtaaatggccgcctggcattatgcccagtmcatgccttatggactttcctacttggcagtacatctacgtattagtcatcgctattaccatggtgatgcggttttggcagtacatcaatgggcgtggatagcggtttgactcacggggatttccaagtctccaccccattgacgtcaatgggagtttgttttggcaccaaaatcaacgggactttccaaaatgtcgtaacaactccgccccattgacgcaaatgggcggtaggcgtgtacggtgggaggtctatataagcagagctcgtttagtgaaccgtcagatcgcctgragacagccatccacgctgttttgacctccatagaagacaccgggaccgatccagcctccggactctagcctaggccgcgggacggataacaatttcacacaggaaacagctatgaccactaggcttttgcaaaaagctatttaggtgacactatagaaggtacgcctgcaggtaccggtccggaattcccgggtcgacccacgcgtccgcgccccggaaaccatggaagtcctcgtcctggccggataccgcgcgcagaaggaggacgagctgagtctggcgcccggggacgtggtccggcaggtgcgctgggtgcccgcgcggggctggcttcgcggagagtttgggggccgctatggcctcttccccgagcgcctggtgcaggagatcccagagaccctgcggggctccggagaggcgcggaggccgcgctgtgcgcgccgccgaggtcatcctgccaaacacccgaggccccaaagatggtgcaaagtgaacttcagctacagcccagagcaggcggacgagctgaagctgcaagctggggagatcgtggaaatgataaaggagattgaggacggctggtggctggggaagaagaacgggcagctgggagccttcccatccaactttgtggaattgctggacagtgggcccccaagccttggtaacccagacatgccttcagtcagcccgggtccccagcggcctcccaagctgagcagcctggcctatgacagccctccagactacctgcagacagggtcctgtttgactaccagcctgaggccccagacgagttggcgctgcggaggggggacgtggtaaaagtactcagcaagaccacagaggataagggctggtgggaaggagagtgtcaaggacgaagaggagtttttccagacaactttgtactcccaccacccccaatcaagaagctggtcccacggaaagtggtatctcgggaatcagctcctattaaggaaccaaaaaagttgatgcccaaaacatccctccccacagtcaagaagctagcaacagccaccactgggcccagcaaagccaagacatctcggacacccagcagggacagtcagaagctcacctcccgagactcaggccccaatggtggcttccaaagtgggggttcgtatcaccctggccgaaagcgatccaaaacccagactccccagcaacgctctgtgtccagtcaggaggaagagcwcagcagcccggtaaaggccccctctgtgaagagaacccccatgccggacaagactgccaccccagagaggcccccagctccagagaacgcccccagctccaagaagatcccggctcctgacaaagtcccctccccagagaagaccctcactctaggggacaaggcctctatcccagggaactccacctcggggaagatcccagctcctgacaaagtccccaccccagagaagatggtgactccggaggacaaggcttctatcccagagaactccatcatcccagaggagaccctgactgtggacaaaccctccactccagagagggtcttttcagtggaagagtcccctgccctagaagccccacctatggataaagtccctaatccaaagatggcccctctgggggatgaggcccccactctagaaaaggtcttgaccccagagctttctgaagaagaggtgtccaccagagatgacattcaattccatcacttctcttcggaggaagccctgcagaaggtcaagtactttgtagccaaagaggatccatcatcccaggaggaggcccacacgccagaggcacccccaccccagcctccttcctcagagaggtgcctgggagagatgaaatgtaccctagttagaggggacagctccccacgccaggctgagttgaagtctgggccagcatccaggcctgcccttgagaagccccacccccacgaagaggctacaacccttccagaggaggcaccttccaatgacgagaggacccctgaagaggaggcgccccccaacgagcagaggcctctgagagaggaggtgctccccaaagagggagtggcttccaaagaggaggtgaccctgaaagaggaattgccccctaaagaggaagtggctccaaaagaggaggtgccccccatagaaagagcctttgcccaaaaaacacgtcctatcaagccgcctccagactcccaagagacgctcgcgctcccctcgctggtcccgcaaaactacacggaaaacaagaatgaaggagttgatgtaacgtcgctgaggggcgaggtggagtctctaaggagggcgctggagctgatggaggaggaagctgaccgacatctgggaggagctgaagagcgagaaggagcagcgccggcggctggaggtccaggtgatgcaggggacccagaagtcccagaccccgcgcgtcatccacacgcagacgcagacctactgagggtgggcctgggaagggaccgcggcctgacctggctggggccacccacgtccttgcacacgactttgggaaacgcgagaaagtaaactctgcctagcacggcgccacgccggtctggtcgctgggggcggggcctgcgcgggggcagggcctgggcctccgcattcctgacggtccctcccaggcacatctggccaacatgtggctcccattaccgttcccaaggcctgcgcgcggctatttttatccaccggatggtgaggggcgggggagggtgtctccttcggactccagccgcgcactggagaaatggcgggcaggaggggcccaggcggggtcgggctcttgacgcccggcctagattccggaatccagctgtgcgccggggaggagccgggcgggccttctcgccagctcggacccctcccagctggcctccctgtccgctcagagggactcctgccctctcgcttgaacgcacctcggcgcakacgtgaagtccaccgtccagcccaagcacgcatgcttacaccggggctagcagcaccttagcctcgaggtcaggatcctgaggcctggtgtgtgtgtcattgcagtgtatgaacccagggcactgtggggacagggcgacgtgtgtccaggcgtttgccggtaaggaatgcgttttgaataaggaatgcgcgcgcgcttgctctgtgtgtgaggctgggtgcaggcctgtgggcttctgcttttctgctggctgtgaagtgaatgcgggcaggtgtgctgtatcgtcgggttggtgggtgggggtggtgcagctagggtaagggagtcaagctgggcctcagtcctggggcccctgcgtggcaggagcctgggggtcgctgggggcaggagtaacagagggagagactgagtcactgagaatgcagctttctttcatttggtcacttcacctcttcatcgaccccagagagggagtggggaccctgcatgctgccccctccccgcccccggggtcttctggcaggactggggaagggagcctctcagggggtggcggtccacgcccagtagcacctgggagctgtgggggccgaggcagtccgaaggtgtggggtagctctgagctcatgtgcaggtccggtaccccgagcgccttgcagcgggagccrgggcccatcagtaatagtgcatgcggcccagggtgcccgtggccgtggggctgggccccagcgtgcctgtgcccagcaggtccggctgcccggtgcgccagatctcccgcaggatccgttcgcgctcctccagccgctgcgcccgctccagctcctccgccgacgtgaagacgttgacgttgaggggcccgtccggctctgcggacagctcggggcccggcagcgtgtcgtcggggcccagccgagtcaccgtgtcctcctcgtcctcgtcgtcgtcctcgggctccagggtgctgctgcgggggtcccggcgctgagccgggccccggggccgcgggcggggcgcccacgagatgctgatgacgagcaggcagagggtgagcagcaggccgaagcagacgcccagcacgaagtagaggccgaagctctcggggttggcgcggatgtgcgcgtaggcagccaggctgttgctgagcaactccatgtcccttcgcggggcatccatgctgctctggggggcagctcccctaccagccgtcagcgccccgcttccmggctgmmcggccccagcgcgtcccgcggccgcatacactgggtccgg

SEQ ID NO: 515 - DNA, 485 bp, Homo sapiens
ccacccgtgaagaaccagcagggccaggacattgacgacaactgggtgaaagacagaaaaaaggagtttgaggagctcattgactccaaccacgacggcatcgtgaccgccgaggagctggagagctacatggaccccatgaacgagtacaacgcgctgaacgaaatctcgcttcagtcactctgccgaaggcgctgacggcatcgcggccggaacctctgggcmcggcccctcccagggccgccgctccgtgggaaaaaacagctcctccatttccttgaaaactgaacgattattaaaaatagattaaacttcgctggaaatgagtagccaggaagttcaggggagggtgccgggtccttcccgggcctggcgtgtcggagccacccaggtcccgcwgctgccgctgagaaaatgcaaatatttgttgtgacaagaatcacatacatttactttaaatataggtgccttttttggcaaaaaaa

SEQ ID NO: 516 - DNA, 652 bp, Homo sapiens
  SITE (489): n equals a,t,g, or c
  SITE (573): n equals a,t,g, or c
  SITE (622): n equals a,t,g, or c
  SITE (639): n equals a,t,g, or c
  SITE (642): n equals a,t,g, or c
  SITE (646): n equals a,t,g, or c
ccatgcttggagaaggacaagtccttcggagcccaaccaaccggctgcttctgcacttccagagcccacgggtcccaaggggcggtggcttcaggatccactatcaggcctacctcctgagctgtggcttccctccccggccggcccatggggacgtgagtgtgacggacctgcaccctgggggcactgscacctttcactgtgattcgggctaccagctgcagggagaggagaccctcatctgcctcaatggcacccggccatcctggaacggtgaaacccccagctgcatggcatcctgtggtggcaccatccacaatgccaccctgggccgsatcgtgtccccagagcctgggggagccgtagggcccaacctcacctgccgttgggtcattgaagcagctgaggggcgccggctgcacctgcactttgaaagggtctcgctggatgaggacaatgaccggctgatggtgcgctcarggggcaagncccctatcccccgtgatctatgattcggacatggacgatgtccccgagcggggtctcatcaagtgacgcccagtccctctacgnggagcttgctgtcagagacacctggcaatcccctgctggtaaaccttcnatttgaagccttttganganggancgcttg

SEQ ID NO: 517 - DNA, 504 bp, Homo sapiens
  SITE (486): n equals a,t,g, or c
  SITE (493): n equals a,t,g, or c
gcctgcaccgagacctcaagacccagaacatcctgcttgacaaacaccgcatggtcgtcaagatcggtgatttcggcatctccaagatccttagcagcaagagcaaggcctacacggtggtgggtaccccatgctatatctcccctgagctgtgtgagggcaagccctacaaccagaagagtgacatctgggccctgggctgtgtcctctacgagctggccagcctcaagagggctttcgaggctgcgaacttgccagcactggtgctgaagatcatgagtggcacctttgcacctatctctgaccggtacagccctgagcttcgccagctggtcctgagtctactcagcctggagcctgccagcggcaccactcagccacatcatggcacaagccctytgsatycgkgccttytcaacttcacaccgacgtgggcagtgtcccgcatgcggagggcagagaagtccgtgggccccagcaacacanggagcangaccaccaatg

SEQ ID NO: 518 - DNA, 970 bp, Homo sapiens
  SITE (789): n equals a,t,g, or c
  SITE (862): n equals a,t,g, or c
  SITE (885): n equals a,t,g, or c
ggcacgaggcgaggtgcgctacgtgaaggagccatacatccagtcgcgcttctaccgggcccctgagatcctgctggggctgcccttctgcgagaaggtggacgtgtggtccctgggctgcgtcatggctgagctgcacctgggctggcctctctaccccggcaacaacgagtacgaccaggtgcgctacatctgcgaaacccagggcctgcccaagccacacctgttgcacgccgcctgcaaggcccaccacttcttcaagcgcaacccccaccctgacgctgccaacccctggcagctcaagtcctcggctgactacctggccgagacgaaggtgcgcccattggagcgccgcaagtatatgctcaagtcgttggaccagattgagacagtgaatggtggcagtgtggccagtcggctaaccttccctgaccgggaggcgctggcggagcacgccgacctcaagagcatggtggagctgatcaagcgcatgctgacctgggagtcacacgaacgcatcagccccagtgctgccctgcgccaccccttcgtgtccatgcagcagctgcgcagtgcccacgagaccacccactactaccagctctcgctgcgcagctaccgcctctcgctgcaagtggaggggaagccccccacgcccgtcgtggccgcagaagatgggaccccctactactgtctggctgaggagaaggaggctgcgggtatgggcagtgtggccggcagcarccccttcttycgagaggagaargcaccaggtatgcaaagagscantsgaccagctggatgacctgagtctgmaggaggctgggcatgggctgtggggtgagacctgsaccaatgcggncttccgacatgawgggccccctnaaggcagcatactggccaccatgtgccccgactcgggccctgagcccatcctggccttctacagcaagccgctggcaggccgcaa

SEQ ID NO: 519 - DNA, 1915 bp, Homo sapiens
ccccccgggctgcaggaattcggcacgagcagccataccctagaggagcgggtggtgcactggtacttcaaactactggataaaaactccagtggagacatcggcaaaaaggaaatcaaacccttcaagaggttccttcgcaaaaaatcaaagcccaaaaaatgtgtgaagaagtttgttgaatactgtgacgtgaataatgacaaatccatctccgtacaagaactgatgggctgcctgggcgtggcgaaagaggacggcaaagcggacaccaagaaacgccacacccccagaggtcatgctgaaagtacgtctaatagacagccaaggaaacaaggataaatggctcataccccgaaggcagttcctagacacatgggaaatttccctcaccaaagagcaattaagaaaacaaaaacagaaacacatagtatttgcactttgtactttaaatgtaaattcactttgtagaaatgagctatttaaacagactgttttaatctgtgaaaatggagagctggcttcagaaaattaatcacatacaatgtatgtgtcctcttttgaccttggaaatctgtatgtggtggagaagtatttgaatgcatttaggcttaatttcttcgccttccacatgttaacagtagagctctatgcactccggctgcaatcgtatggctttctctaacccctgcagtcacttccagatgcctgtgcttacagcattgtggaatcatgttggaagctccacatgtccatggaagtttgtgatgtacggccgaccctacaggcagttaacatgcatgggctggtttgtttcttgggattttctgttagtttgtcttgttttgctttccagagatcttgctcatacaatgaatcacgcaaccactaaagctatccagttaagtgcaggtagttcccctggaagaaataatattttcaaactgtcgttggtgtgatactttggctcaaaggatctttgcttttccattttaagcttctgttttgagttttgccctggggcttgaatgagtcccagagagtcgttcggatggtgggaggctgcctaggaggcagtaaatccagtcacagtgcctgggaggggcccatccttccaaaatgtaaatccagtcgcggtgtgaccgagctggctaacaggcttgtctgcctggttttcttcctacacgtggacattattctcctgatcctcctacctggtccaccccagggctaccggaaggtaaaatcttcacctgaaccaattatgagcagtctccttactgaaggtacagccggatacgtggtgcccccggggctggtgttggcagccggggggaggtgcctgagggtccccacggttcctttctgcttttctgaatgcatcaagggtacgagaacttgccaatgggaaattcatccgagtggcactggcagagaaggataggagtggaatgcccacacagtgaccaacagaactggtctgcgtgcataaccagctgccaccctcaggcctgggccccagagctcagggcacccagtgtcttaaggaaccatttggaggacagtctgagagcaggaacttcaagctgtgattctatctcggctcagacttttggttggaaaaagatcttcatggccccaaatcccctgagacatgccttgtagaatgattttgtgatgttgtgatgcttgtggagcatcgcgtaaaggcttcttgcttatttaaactgtgcaaggtaaaaatcaagcctttggagccacagaaccagctcaagtacatgccaatgttgtttaagaaacagttatgatcctaaactttttggataatcttttatatttctgacctttgaatttaatcattgttcttagattaaaataaaatatgctattgaaactaaaaaaaaaaaaaaaaaaa

SEQ ID NO: 520 - DNA, 155 bp, Homo sapiens
  SITE (1): n equals a,t,g, or c
nattttttgggctttgatttattgcgaaggaactcttgaagggtttgatttcctttttgccgatgtctccactggagtttttatccagtagtttgaagtaccagtgcaccacccgctcctctagggtatggctgctcgtgccgaattcctgcagc

SEQ ID NO: 521 - DNA, 810 bp, Homo sapiens
  SITE (763): n equals a,t,g, or c
  SITE (790): n equals a,t,g, or c
taatacgactcactatagggaaagctggtacgcctgcaggtaccggtccggaattcccgggtcgacccacgcgtccgcacaacactctgaatgttaatccagatccctcttgttgagtagctgcagagacggcagatggaaaatatgctcagaagttgtttaatgacctttttgaagattattccaatgctcttcgtccagtggaagatacagataaagtcctgaatgtgaccctgcagattacgctctctcagattaaggatatggatccaatccagaataccacattatatttagccaaaatatacttttcggggaaaaacttgtaaggaagacttcaaaaatatgcatccaaatgttaacagaaatgtccaattaaggctctttggttgtaagcatcagaaactgactttggcaaccttgtgaaataggratttgttagaaggatgtggcacatctyattgaattaaaggaaaaagtawacaaccagctcttggaaaggacagaaccaaggctgctctagtgttcaaggcaggagggactgtctgttttttttcagccatcactagggtgatgcttttggtctctggatcactctgcttaagatcgaaactctggagagggtgaatctgttggaccaagcctgggccacccagcccggcctttgccagggacactggggcaccttgaccaacacttcctctgccttgcaatgggagaggaagtaatgggagaaggaggaagtaacgggagaaagagtaanttccttagagaaaaatagaaattctgnaccccaaaatacaaggcata

SEQ ID NO: 522 - DNA, 810 bp, Homo sapiens
  SITE (548): n equals a,t,g, or c
  SITE (576): n equals a,t,g, or c
  SITE (710): n equals a,t,g, or c
  SITE (714): n equals a,t,g, or c
  SITE (721): n equals a,t,g, or c
  SITE (749): n equals a,t,g, or c
  SITE (789): n equals a,t,g, or c
  SITE (804): n equals a,t,g, or c
aaaagctatttaggtgacactatagaaggtacgcctgcaggtaccggtccggaattcccgggtcgacccacgcgtccggaaggagaagctcaaagcataacctccttagcttcatcctagatctacttgaaactacaatattaaccattcacttaaaagtcattaacaccataggaatgagtcctgggactaacagtgttgagtggtcatcctgaaccatattcctactggtttttttggtctctttttctctctgtctaggactttacaatgactttttatctcaggcattactggaaagacgagaggctctcctttcctagcacagcaaacaaaagcatgacatttgatcatagattgaccagaaagatctgggtgcctgatatcttttttgtccactctaaaagatcctcatccatgatacaactatggagaatatcatgctgcgcgtacaccctgatggaaacgtcctcctaagtctcaggrtaacggtttcggccatgtgcyttatggatttcagcaggtttcctcttgacactcaaaattgntctcttgaactggaaagctatgcctacnatgaggatgacctaatgctatactggaaacacggaaacaagtccttaaatactgaagaacatatgtccctttctcagttcttcattgaagacttcagtgcatctagtggattagctttctatagcagcacaggntggnacaatangcttttcatcaactttgggctaaaggangcatggtttcttctttgggctgcaaacctattttcccagnccttaattggatggngaaggc

SEQ ID NO: 523 - DNA, 990 bp, Homo sapiens
  SITE (713): n equals a,t,g, or c
ggtgagagtgaataaatatcaaaaatctgttgggtggagatacagtgatgaggaagaggatctcaggactgaactcaaccttctgaggaagtactctttccacaaaaacattgtgtccttctatggagcatttttcaagctgagtccccctggtcagcggcaccaactttggatggtgatggagttatgtgcagcaggttcggtcactgatgtagtgagaatgaccagtaatcagagtttaaaagaagattggattgcttatatctgccgagaaatccttcagccaaaagtcatatttctgggaacgggttgtagtgattccagcctaaagaaagaattgtgtctgaaacatcaaaattaagctgtttctcttatcaaaagtttttccaaaaatactaagaactgtaccagaaagaaagaaagaaagaaagaaagaaagaaatatatactgatgtggctttttaaaaaatatatacagggcttagctcaccttcacgcacaccgagtaattcaccgggacatcaaaggtcagaatgtgctkctgactcataatgctgaagtaaaactggttgattttggagtgagtgcccaggtgagcagaactaatggaagaaggaatagtttcattgggacaccatactggatggcacctgaggtgattgactgtgatgaggacccaagacgctcctatgattacagaagtgatgtgtggnctgtgggaattactgccattgaaatggctgaaggagcccctcctcttgtaaccttcaacccttggaagctctcttcgttattttgcgggaatctgctcccacagtcaaatccagcggatggtcccgtaagttccacaatttcatggaaaagtgtacgataaaaaatttcctgtttcgtcctacttctgcaaacatgcttcaacacccatttgttcgggatataaaaawtgaacgacatgttgttgagtcattaacaaggcatcttactggaatcatt

SEQ ID NO: 524 - DNA, 1981 bp, Homo sapiens
  SITE (1752): n equals a,t,g, or c
  SITE (1919): n equals a,t,g, or c
  SITE (1953): n equals a,t,g, or c
  SITE (1964): n equals a,t,g, or c
tttaaccgattaatttgatttagatcgcaatttgcgatttaaacacaaatctaattccttgatttaaaatactttcactctgttactatacgaaaacgttaattatcttgcccaaaaatcaggcaattattgccctgaaaacgtgcatttgcgcasaatcatcaaatccatacccgacaaaaaccgtgcaaaataacaacaaatgttaacagatagcattaaatattgcacaaatgataaccgaatttgtgtttatcccgattttcgcgatcgcagccggagtggcgcaatccctgcaatacttaaatcggtatcatgtgatacgcgagcctccggagcatattttgaacaggttaccttcgagcgcatcggctttagcgtgcagcgcccacgccctgaatctcattgagaagcgaacgctggatcatgaggagatgaaagcacttaaccgagaggtgattgaatacttcaaagagcatgtcaatccggggtttttagagtatcgcaaatctgttaccgccggcggggattacggagccgtagagtggcaagcgggaagtttaaatacgcttgtcgacacccagggccaggagtttatcgactgcctgggaggttttggaattttcaacgtggggcaccgtaatccagttgtggtttccgccgtacagaatcaacttgcgacaatgtccagcgtgggcggtgagccatggggcttctccaaaacgtgttttttgttgttaattcggtgtagacttgtaaacctaaatcttttcaatttggtttacaagtcgattatgacaacggacgatcttgcctttgaccaacgccatatctggcacccatacacatccatgacctcccctctgccggtttatccggtggtgagcgccgaaggttgcgagctgattttgtctgacggcagacgcctggttgacggtatgtcgtcctggtgggcggcgatccacggctacaatcacccgcagcttaatgcggcgatgaagtcgcaaattgatgccatgtcgcatgtgatgtttggcggtatcacccatgcgccagccattgagctgtgccgcaaactggtggcgatgacgccgcaaccgctggagtgcgtttttctcgcggactccggttccgtagcggtggaagtggcgatgaaaatggcgttgcagtactggcaagccaaaggcgaagcgcgccagcgttttctgaccttccgcaatggttatcatggcgatacctttggcgcgatgtcggtgtgcgatccggataactcaatgcacagtctgtggaaaggctacctgccagaaaacctgtttgctcccgccccgcaaagccgcatggatggcgaatgggatgagcgcgatatggtgggctttgcccgcctgatggcggcgcatcgtcatgaaatcgcggcggtgatcattgagccgattgtccagggcgcaggcgggatgcgcatgtaccatccggaatggttaaaacgaatccgcaaaatatgcgatcgcgaaggtatcttgctgattgccgacgagatcgccactggatttggtcgtaccgggaaactgtttgcctgtgaacatgcagaaatcgcgccggacattttgtgcctcggtaaagccttaaccggcggsacaatgaccctttccgccacactcaccacgcgcgaggttgcagaaaccatcagtaacggtgaagccggttgctttatgcatgggccaacttttatgggcaatccgctggcctgcgcggcancaaacgccagcctggcgattctcgaatctggcgactggcagcaacaggtggcggatattgaagtacagctgcgcgagcaactttgcccccgcccgtgatgccgaaatggkttgccgatgtgcgcgwasktgggggccattgggcgttggtcgaaaaccaattcaatnccggtgaatatgggccggcgctggcaaaaatttncttttgttcgnaacaaggtggtcttgga

SEQ ID NO: 525 - DNA, 321 bp, Homo sapiens
  SITE (301): n equals a,t,g, or c
  SITE (314): n equals a,t,g, or c
  SITE (318): n equals a,t,g, or c
acaagcagtggccacgtggccgtctcgagttccagactgaccactccacagggaagaggrgcttcaacatcacttttaccaccttccgacacaacgagtgcccggatcctggcgttccagtaaatggcaaacggtttggggacagcctccagctgggcagctccatctccttcctctgtgatgaaggcttccttgggactcagggctcagagaccatcaactgcgtcctgaaggagggcagcgtggtcttggaacaacgctgtgctgcggtgtgaagttccctgtggtggtcaactgattngcccagggcaacncctnttt

SEQ ID NO: 526 - DNA, 678 bp, Homo sapiens
  SITE (669): n equals a,t,g, or c
gcgcaaatcttctggcaaacgacgtggatttccattccttcccattcgtagcctttggtaaaggaatcatcaagaaatgtcgcacgagcccagacgcctttgtgcagctggccctccagctggcgcactacaaggacatgggcaagttttgcctcacatacgaggcctccatgacccggctcttccgagaggggaggacggagaccgtgcgctcctgcaccactgagtcatgcgacttcgtgcgggccatggtggacccggcccagacggtggaacagaggctgaagttgttcaagttggcgtctgagaagcatcagcatatgtatcgcctcgccatgaccggctctgggatcgatcgtcacctcttctgcctttacgtggtgtytaaatatctcgctgtgggagtcccctttccttaaggaagttttatctgagccttggagattatcaacaagccagacccctcagcagcaagtggagctgtttgacttggagaataacccagagtacgtgtccagcggagggggctttggaccggttgctgatgacggctatggtgtgtcgtacatccttgtgggaggagaacctcatcaatttccacatttcttccaagttctycttgcccgaracggattcycatcgctttggaagcactgaaaaaagcaagangacaccaca

SEQ ID NO: 527 - DNA, 835 bp, Homo sapiens
ccaaatcctgggttgcagcagagaaaatgtaccacactcatagacggcgaaggctggtccgaaaacgcaagaaagatttaacacagactgcttcaagcaccgcaaggccatggaggaattgcaagaccaagagggctgggaatatgcttctctaattggctggaaatttcactggaaacaacgtattcagataccttccgccgcagacgctggaggagaaaaatggctccttcagaaacacatggtgcagctgccatctttaaacttgaaggtgcccttggggcagacactaccgaagatggggatgagaagagcctggagaaacagaagcacagtgccaccactgtgttcggagcaaacacccccattgtttcctgcaattttgacagagtctacatctaccatctgcgctgctatgtctatcaagccagaaacctcttggctttagataaggatagcttttcagatccatatgctcatatctgtttcctccatcggagcaaaaccactgagatcatccattcaaccctgaatcccacgtgggaccaaacaattatattcgatgaagttgaaatctatggggaacccaaacagttctacagaatccacccaaagktatcatggaactttttgacaatgaccaagtgggcaaagatgaatttttaggacgaagcattttctctcctgtggtgaactgaactcagaaatggacatcacacccaaacttctctggcacccagtaatgaatggagacaaagcctgcggggatgttcttgtaactgcagagctgattctgaggggcaaggatggctccaaycttcccattcttccccct

SEQ ID NO: 528 - DNA, 422 bp, Homo sapiens
  SITE (43): n equals a,t,g, or c
  SITE (292): n equals a,t,g, or c
  SITE (386): n equals a,t,g, or c
agatactggcccacttccgggacaggggtcaattctgcctganttatgagtcggccatgactcgcttattcctggaagaccggacggagacggtgcggtcttgcagaagggaggcctgcaactttgtcagggccatggaggacaaagagaagacggacccacagtgcctcgccctgttccgcgtggcagtggacaagcaccaggctctgctgaaggsasccatgagcgggcagggagttgaccgccacctgtttgcgctgtacatcgtgtcccgattcctccacctgcagtngmccttcctgacccaggtccattcggagcagtggcagctgtccaccagccagatccctgttcagcaaatgcatctgtttgacgtccacaattanccggactatgtttcctcaggcggtggattcgggcct

SEQ ID NO: 529 - DNA, 381 bp, Homo sapiens
gtcaccttcaggatctgaccctctcggaagggaagctcttcttctccagcatcaggattgggcgacattgacacggggtcatagtcaaacasagccacaaagatcctgacgggtaagtgctggtaagccartgtttctgaggggctcctcgcagggactakctctgcagtgcttggsctgaggactcggacacctctcttctgggggcccctccgcccagagccgtcctgccctctggcctctccggtctctgttgcccgggagagtggctccttggctctgcccgtcgcactgcggcctctccgctctggttcccctttctcccaggctgggaggcgtgggtagggcttggggcctgaattggcttcggagccccctggg

SEQ ID NO: 530 - DNA, 343 bp, Homo sapiens
  SITE (319): n equals a,t,g, or c
  SITE (338): n equals a,t,g, or c
  SITE (340): n equals a,t,g, or c
gagcatccaggagggcaagtacgagttccccgacaaggactgggcccacatctcctgcgctgccaaagacctcatctccaagctgctggtccgtgacgccaagcagaggctgagtgccgcccaagtcctgcagcacccctgggttcaggggtgcgccccggagaacaccttgcccactcccatggtcctgcagaggaacagctgtgccaaagacctcacgtccttcgcggctgaggccattgccatgaaccggcagctggcccagcacgacgaggacctggctgagaaaaaaaaaaaaaaaaaaaaaaaaaaaaaaaanaaaaaaaaaaaaaaaaaananaaa

SEQ ID NO: 531 - DNA, 538 bp, Homo sapiens
  SITE (488): n equals a,t,g, or c
  SITE (513): n equals a,t,g, or c
  SITE (522): n equals a,t,g, or c
agacccggctggtataacaagaggattgcctgatccagccaagatgcagagcacttctaatcatctgtggcttttatctgatattttaggccaaggagctactgcaaatgtctttcgtggaagacataagaaaactggtgatttatttgctatcaaagtatttaataacataagcttccttcgtccagtggatgttcaaatgagagaatttgaagtgttgaaaaaactcaatcacaaaaatattgtcaaattatttgctattgaagaggagacaacaacaagacataaagtacttattatggaattttgtccatgtgggagtttatacactgttttagaagaaccttctaatgcctatggactaccagaatctgaattcttaattgttttgcgagatgtggtgggtggaatgaatcatctacgagagaatggtaatagtgcaccgtgatatcaagccaggaaatatcatgcgtgttataggggaaganggacatctgtgtacaaactcacagntttggtgcngctagagaatagaaga

SEQ ID NO: 532 - DNA, 992 bp, Homo sapiens
gctggaagagtaccaggccctgaccttcctgaccagaaatgaaattctgtgcatccatgacaccttcctgaagctctgccctcctgggaagtactacaaggaggcaacgctcaccatggaccaggtcagctccctgccagctctgcgggtcaaccctttcagagaccgtatctgcagagtgttctcccacaaaggcatgttctcctttgaggatgtgctgggcatggcatctgtgttcagcgagcaggcctgcccaagcctgaagattgagtatgcctttcgcatctatgattttaatgagaatggcttcattgatgaggaggatctgcagaggatcatcctgcgactgctgaacagtgatgacatgtctgaggacctcctgatggacctcacgaaccacgtcctgagtkagtcggatctggacaatgacaacatgctgtccttctcagagtttgaacatgcaatggccaagtctccagatttcatgactcctttcggattcrcttctggggatctgatgtagcggcaaatacctgacatggcagcctcgagggagaccacaggaatcgaaccccctccagcactggagggagctggtttgaagtgtgactttgtactgggcccacmctcacctctagaatattgtttattagataaaagaaaaagcttttccttagcccatcagatcatcgctttttaaatgcagggtcatacatggtactttttattaagaactgccctttccagggcttcagtgtgccagcgatgtcaagcaggctggggtggcaatctttctgagggaatagttcaaatctcaacccatgtcatagcagggggccaagccaaatgggatgaaggtccctagcaagatacatgtccttccctcccttcatcaaaacccccgacccccagcacctcacagttcacagctgcacagagacgtgcacatagcagccattccagccggtgcccggtccccactccccttctga

SEQ ID NO: 533 - DNA, 512 bp, Homo sapiens
  SITE (498): n equals a,t,g, or c
aattcggcacaggtagatcgtagccatcaagatcctgaagaacacccatcctatgcccgacaaggtcagattgaagtgagcatcctggcccggttgaagcacggagagtgccgatgactataacttcgtccgggcctacgaatgcttccagcacaagaaccacacgtgcttggtcttcgagatgttggagcagaacctctatgactttctgaagcaaaacaagtttagccccttgcccctcaaatacattcgcccagttctccagcaggtagccacagccctgatgaaactcaaaagcctaggtcttatccacgctgacctcaaaccagaaaacatcatgctggtggatccatctagacaaccatacagagtcaaggtcatcgactttggttcagccagccamgkctycaaggctgtgtkctycacctacttgcagtccagatattacagggccctgagatcatcttggtttaccattttgtgagcaattgacatgtngtccctgggctgtt

SEQ ID NO: 534 - DNA, 336 bp, Homo sapiens
  SITE (171): n equals a,t,g, or c
  SITE (178): n equals a,t,g, or c
gacccacgcgtccgccacttaacagccacttgtttcatcccacctgggcattaggttgacttcaaagatgcctcagttactgcaaaacattaatgggatcatcgaggccttcaggcgctatgcaaggacggagggcaactgcacagcgctcacccgaggggagctgaaaanactcttngagcaagagtttgccgatgtgattgtgaaccccacgatccagcaactgtggatgaggtcctgcgtctgctggwtgaagaccacacagggactgtgggaattcaaggaattcctggtcttagtgtttaaagtttgcccaggcctgttttcaagacactg

SEQ ID NO: 535 - DNA, 1077 bp, Homo sapiens
ggcagagccctgctcccctctccgaccctttgagccgtggccgttgccagatgtccacaatgggaaacgaggccagttacccggcggagatgtgctcccactttgacaatgatgaaattaaaaggctgggcaggaggtttaagaagttggacttggacaaatcagggtctctgagcgtggaggagttcatgtccctgccggagctgcgccacaacccgttggtgcggcgagtgatcgacgtcttcgacaccgacggtgatggagaagtggacttcaaggaattcatcctggggacctcccagttcagcgtcaagggcgacgaggagcagaagttgaggtttgcgttcagcatttacgacatggataaagatggctacatttccaacggggagctcttccaggtgctgaagatgatggtgggcaacaacctgacggactggcagctccagcagctggtcgacaaaaccatcatcatcctggacaaggatggcgatgggaagatatcctttgaggaattcagtgctgtggtcagagacctggagatccacaagaagctggtcctcatcgtatgagcctttttcttacaagcaccacccaacaacttctgctttcttccctatctctttcaagatttgctcaagacgtccaactgtctctctgacttatctggaagtatttctttttgtgaagccatatgtcctaacaggagcttcatcaccaactcagtgctattaattctccttctctgaatgactcagggtaccctatagggggaagagcaagtcaaatgagcatagtggggaaagaaaaggaaatggcttttataaacatcttttactttgttttgattcaaagaccaaactagaactttaaaagttcaaaaataagaaagtatacatttttgctgttatttctcatcattttgtatatgggaggaaatttataatttgcatgggtgttaggtgaactgttttcatttgcttgtgttcagatatcttgccagattgttaacttcctattgtagcaacagggacaaatatatttgtytttgcyggrmaaaaaaaaaaaaaaaaaaaa

SEQ ID NO: 536 - DNA, 328 bp, Homo sapiens
  SITE (231): n equals a,t,g, or c
  SITE (236): n equals a,t,g, or c
gtttgccttctttgccgtggagatggtggtgaagatggtggccttgggcatctttgggaaaaagtgtkacctgggagacacttggaaccggsttgactttttcatcgtcatcgcagggatgctggagtactcgctggacctgcagaacgtcagcttctcagctgtcaggacagtccgtgtgctgcgaccgctcagggccattaaccgggtgcccagcatgcgcatccttgncacgntgctgctggatacgctgccatgctgggcaacgtcctgctgctctgcttcttcgtcttcttcatcttcggcatcgtcggcgtccagctgtggg

SEQ ID NO: 537 - DNA, 1556 bp, Homo sapiens
  SITE (146): n equals a,t,g, or c
  SITE (151): n equals a,t,g, or c
  SITE (247): n equals a,t,g, or c
  SITE (686): n equals a,t,g, or c
  SITE (1378): n equals a,t,g, or c
gaaagaggagtcatggcacatccacttcttcgagtacgggcgtggcgtgtgcatgtaccgcacagccaagacgcgggcactggtcctgaagggtatccctgagagcctccggggagagctgtggctcctcttctccggggcctganatganatggtgactcaccccgggtactatgctgagctggtggagaagtccacgggaaagtacagcctggccacagaggagatcgagcgagacctgcaccgntccatgcccgagcaccctgcctcccagaacgagctggggattgctgccctccggcgggtgctgactgcctatgccttccgaaaccccaccatcggctactgccaggcaatgaacatcgtgascctmggtgctcctgctctatggcagtgaggaggaggccttctggctcctggtggccctgtgcgagcgcatgctgcccgactactacaacaccagggtggtggggagccctggtggaccaaggcatcttcgaagagctcacgagagacttcctgccgcagctctcggagaagatgcaggacctgggggtgatctccagcatctcgctgtcctggttcctgaccctcttcctcagcgtcatgcccttcgagagcgccgtggtcatcgtcgactgctttttctatgagggcatcaaggtgatcctgcaggtggccctggncgtcctggacgccaacatggagcagctgctgggctgcagcgacgarggcgaggccatgaccatgctgggcagatacctggataatgtggtcaacaagcagatgtctctcctcctatcccgcacctccgtgccttgctgagcagcagcgatgacccccctgcagaggtggacatctttgagctcctgaaagtgtcctatgagaaattcagcagcctgagggccgaagacattgagcagatgcggtttaaacagaggctgaaagtgatccagtccttggaggacacggccaagaggagtgtggtccgagctatacctgtggacattggtttctccattgaagagctggaggacctttacatggtgtttaaggccaagcacctggctagccagtactgggggtgcagccgcacaatggccggccgtcgggaccccagcctgccctacctggagcagtaccggattgatgccagccagttccgggaactctttgccagcctgacaccctgggcctgtggctcccacacacctctgctggcagggcgcatgttcaggctcctggacgaaaacaaggactcgctgatcaacttcaaggagttcgtgacagggatgagcgggatgtaccacggggacctgacagagaagctcaaggtgctctacaagctacaccttcccccagctctgagcccagaggnaagccgagtcagccctggaggcgrcccattatttcacagaggacagctycttcagaagaagcacttaccacaggaagagcaagaaggaagtggaagtgaggagagaggagaggagaaggggaccagctctccggactatcggcattaccttcgattgtgggcccaaggagaaagaggt

SEQ ID NO: 538 - DNA, 722 bp, Homo sapiens
  SITE (90): n equals a,t,g, or c
  SITE (99): n equals a,t,g, or c
  SITE (722): n equals a,t,g, or c
ctcttctagccgcaccccatccgggtctgcagacccaaccctcctgaggcccctttccattagcccctgctccacggataagcccgcctntcgcaggtnccaccctctcccgacggaccttccgagccgcgggttactcgccctgtccctcaagtacgtccccgccggctccgagggcgcaggactgcccccgagcggggagctgcacttctgggtgaaggaggctcgggacctcctgccgctgcgggcaggatccctggacacttacgtacaatgcttcgtgctgcctgatgacagccrggccagccgccagcgtacaagggttgtgcgacgcagcctcagccctgtgttcaatcacaccatggtgtacgatggctttgggcctgctgacctgcgccaggcttgtgccgagctctccctctgggaccatggggccctggccaaccgccagctgggrggcacacgcctcagcctgggcaccggcagcagctatgggctgcaggtgccctggatggattccacacctgaggagaagcagctgtggcaagccctcctggagcagccgtgcgartgggtggatggccttctacccctcagaaccaacctggcccccaggacgtagccccaccaagcctctctctctggacccccatctcagggcctgcccttggctaaagtcaataaagtctattctaagagcaaaaaaaaaaaaaaaaaaaaan

SEQ ID NO: 539 - DNA, 4657 bp, Homo sapiens
  SITE (155): n equals a,t,g, or c
  SITE (188): n equals a,t,g, or c
gatatagggtcaaagtcagaccctttatgtgtgtggttttgaatacaagtggtcacagtgggtatgaggttgagcgcacagaaggattaagaattgcttgaatcccaattttccaagacatttattattgattactactttgaagtggttcaganattgaaatttggggtttatgacatcgacaacanaactattgagctgagtgatgatgacttcttaggggaatgtgaatgtaccctkggacaaattgtttccagcaagaagctaactcgaccactggtgatgaaaactggcagacctgcaggaaaagggagcattacgatttcagctgaagaaataaaagataatagagtggtcttgtttgaaatggaagccagaaaactggataataaggatctatttggaaagtcagacccatacctggaattccacaagcagacatctgatggaaactggctaatggttcatcggacagaggttgttaaaaacaacttgaatcctgtttggaggcctttcaagatctctcttaactcactgtgttacggagatatggacaaaaccattaaggtggagtgttatgattatgacaatgatgggtcacatgatctcattggaacatttcagaccaccatgacaaaactgaaagaagcctccagaagctcacctgttgaatttgaatgcataaatgagaaaaaaaggcaaaaraaaaaaagctacaagaattcaggtgttatcagtgtgaaacagtgtgagattacagtagaatgcacattccttgactatataatgggaggatgtcagctgaattttactgtgggagtggacttcactggctccaatggtgacccaaggtctccagactcccttcattacatcagccccaatggcgttaatgagtatttgactgctctctggtctgtgggactggtcattcaagattatgatgctgataagatgtttccagcttttggttttggcgctcagatacctcctcagtggcaggtatcacatgaatttccaatgaacttcaacccatccaatccctactgcaatggaatccaaggcattgtagaggcgtatcggtcttgtcttcctcagataaaactctatggaccaactaatttttctccaatcataaatcacgtggccaggtttgctgctgcagccacgcaacagcagacagcttctcaatatttwgtgcttttgattattactgatggtgtgatcacagaccttgatgaaaccagacaagctatagttaatgcctccagctgcctatgtccatcataattgttggagttggaggtgctgacttcagcgccatggagtttctggatggtgatggtggaagtctccgctccccattgggcgaagtggccatcagagatattgtccagtttgtgcctttcagacagttccagaatgctccaaaagaagcacttgctcagtgtgtcttggcagagattccccagcaggtggtgggctacttcaatacatacaaactccttcctcccaagaacccagccacgaaacaacagaagcagtgaccacttcaacagaattcttttgtgttctgtggagcaatgccatctctcaccccaaatcgtgtatctgtcattctacgtactttttaccctcagcatttatgatgtaaatctctttctctatggattatatctgtttaaagcattctttctaggttattttggggggacagtgccaagtccatctttgcccagtcaattcagtgattgatagcaatttacattaattgcagtaaagctctttggattagaaattagtgtggggaaagcttattctgttgttgtttttgtttactttcatatgatgaaaatgctgtgtttaagtgtttgtcaataggaagaatggaaaactgttgggatgatgtggtttgcaggttgctgtgcctgattcacagtgtatgttgtataagccartgtccatacctgattatgagagcttcttaaattatatgatatcaaatttgttcctgtaactctgtatacagtgcttttctgcaaggtaaaaataacctgtctatgcatctgatttttgctacagtttagacactgtggtttacaaaacagcatgcactcaacttgggactttatgaaaagtactgaatgagcaggaaaaggcacatactcagttttttaaatgtacaatcaacaagtaaaaataacctcatgtaagtaagccatttttatttgcctttctagatattttattttattgtggaaaactgtaaacatggtcagatttggctttttttttcattaactgagcaagactttcaggatattgtagatgcacagatggtaggttgtcctgaattctacattattagattactttaattgagatttgttaaaacggttaggactgttttgtccaggaaagataagaggaccaaacatataaggtgaaattcagaattccgtttccttctaactaatgaaaaactgcttactaaaaaaaaattttatactttccttgctaaggtcccatatattgatttgtacagatccacttagtcattttctcctttttttaagaaccattttcatctgatttttaaactcacgataccagttatctgttaatcaaaattgcattttacaatttaataatgtgatatttcctatgtctacagcataccttattaggtataaaacctactgcaacttagaaaaaggaaagaaaaaagaaaacttttccaactgctgcattaagatagggtggattttatgtgctttttttttaagagttgaatttcttttcctgacttttaccttttacagcgtattacttastgaacattacattttcagaatagatcctaatattttattgagggcctatgtgctaaaaactatgcatatctatatattggccaattatctttaataatttaccttttgaaattgcatgtttatcatatatccttaagtggacacatacagtgccatgttgatgtgcctctcagttttattgaaaagctgccccacagcccatgtctcttgttctctgcaatgcctcaagggagtgagctctcaaccacagatagctgtggcttctcagaagcagctcattgccaaggccaggctgagaggggacctgcttgctgtggtggttgcctagcccagatgagcatttacctaccaccttcccacttggctagctgtcctttggatatgtgctgttaactggggaaggcatctaactagtagcctgctactccatagtatggctcaatagatgacacatcattttgacattatcaataggagaaaagaaaactaacccttcttctgattgtttggagccatagttgtctcagatgttctaattctctttgtatgcttggaaacagcatagatatgttgctgtggttttcagaattttctcttttaatcacaagaagccttttaaaaaatgacttacacatattctcaatgtacagtaaaacagacagaagtgagcttatctgtttgatgctgtggcagggtcccagtcactgggcatatcctccttctccttaaccagctcctcagcagcccctgagtcacctgcacaaggtgcttgggaactgctggttatgagcattcctggttttcttcagccaaataacaggtaatcactgtcaattggatttggtcttcattattttatattctgattttatcagaattattctattttaaaattgttttaaaatttaaaaacatttaattcatgatcatgttcatcagtagatgctattattcataagaactgtgattccagcaaactagggtaattggtgcctttttacagttttgaataaaagcatttacaatttctaaattatcagttttcacagtttcagcactcaacctcatcatacgctgatttaatattgttttacattaaaatagtccttttccctgttgtgccaccattcatttaagtgctgtttgttcttaaaatgcatttaaagaaaaattacccatattgactttcacacytcatataatcagatctattacaaatatatatcggagtgacggtgcccaggatagatgtaatatttcttacagatgctggcacagaggaaataatataccagctaatctagtcacctaaccttgtggttagaattgcaattttaagaccagaaaaatttgaagtctgatcagagatttacaactgttcattatagtggtgccttaggcaatctttccaaagtaaattcagggccccattgctacttatgccatatttggacatactttttttttcttcaattttgtaaacttcctggaaagctgtcttcactaagtatcccctagtctctatatatgtggttagtagtcatggaaatgacacataaagtacgccagaagtttgatggaacgtgttagaaactgttttgtgcttttatggatgtcatacttgacaatacatgtgtaagttactaatatatgaattgatgctaaatatatcttacatttgaattccttttggataaagttatttcttgatgtgacasagtagtgtgttttcatttttattctttacatgtgaccaaaacaatagaaaagttaaaaataaaatatagtgttttaggtggcaaaaaaaaaaaaaaaaaaaaaaa

SEQ ID NO: 540 - DNA, 829 bp, Homo sapiens
  SITE (799): n equals a,t,g, or c
gtggctgctccggcccttccgcctccagctcggccatggggtcgcgcactcccacgccgcggtcattcccgacggggacagtattcggcgagagaccggcttctcccaagccagcctgctccgcctgcaccaccggttccgggcactggacaggaataagaagggctacctgagccgcatggatctccagcagataggggcgctcgccgtgaaccccctgggagaccgaattatagaaagcttcttccccgatgggagccagcgagtggatttcccaggctttgtcagggtcttggctcattttcgccctgtagaagatgaggacacagaaacccaagaccccaagaaacctgaacctctcaacagcagaaggaacaaacttcactatgcatttcagctctatgacctggatcgcgatgggaagatctccaggcatgagatgctgcaggttctccgtctgatggttggggtacaggtgacagaagagcagctggagaacatcgctgaccgcacggtgcaggaggctgatgaagatggggatggggctgtgtccttcgtggagttcaccaagtccttagagawgatggacgttgagcaaaaaatgagcatccggatcctgaagtgactccgtttgtgccttgggcttgctcctgcaaccagtatctccttggaattcatccaaagcccccatggacgcatggacgcaggcgacaataaactgtattttcgtttctaactctatttagggccaagagaagaaagctggaggatgtgtacttaaagtttagcttcagcagtncccaaaccttttttgggaatcaagggacaa

SEQ ID NO: 541 - DNA, 1374 bp, Homo sapiens
ctacgagttttttttttttttttttttttttttttttttttttttttttttttttttcatgctgccccagatgtctttattgaggcctctcatttgacccaaatacattaacaagtgattgctgagatacagtcccaaacacagtattctcccttccttctggccaaggacaggacagtcagaaagatacaggattagagagagtgggggaaagctgtgcatagatggagggaacagaacagagatggggcccatatatatggctagaggagaatcacaagaaagagtatggagagtgatggaagagacacataatagatacaagtaagttatgggataagaaacagaagtcagataagagagagctggcctggtgtctagggaaaagtagctcatttgctcatcaaatgagggggatcagtgtctcagcacccagcatatagaccccagttagctctatggcagagaataacctagtctccctggaggaactcagggaaggacaagggaaggcaggagagagcatgaaaagaccagtggggctgaaagatggttgccatagcaactagtcatcatcatcatcgtcatcgtcctctgtgttgatctcgccctccaggacatcctccagccagtcctccagctcctcagcagaaggcaggtcctcctcatcgtccatttccatccatacgctatccgcatcagtaacattgacgactcctatttgtggggctgacaagtcgatgtcaaacgtcttctcccagtatgggaccagcagggggaagtcatcagggtcaatccagatgatgctaagatctgggttttcagtgttatcttgggccacagccttgagagtctctaagaactcgaaaccatcaggatcagcttcctctgcgaaggccacaatgtggattccatccatatcatcctcccaggtctcatacatactctccggcttcagtttcctcagggttgatctcctgtgctcctccacgaagttgacaatctcctcttcgctattgggcttgtctgggatggtcacaggctcttccatgaaggcctcgtagaaatcaatctcattcagcttcagggtcagcttctttgccaccttgctgtcgaaggtggcgaagaaggggatgtagggatgaaactcctcagctgcatcctcgaaggctttgtaatgctctgagtctttgctcttgaagtagccaatgagtttgatctcatcctcaatattctcaaacgcctgcagctctcgttcaccttcaatcaattccacagggtcctctaggacatcaagcagaaactccacgatggtrtcagcagaaaactcsccatcgtactcaatgacttcatctcccttgaatacatacatgc

SEQ ID NO: 542 - DNA, 3103 bp, Homo sapiens
ggaagaagggtctcgggtccctaagccacgggagaacctgcagttttggaggatttgacttgacgaatcgctctctgcacgttggcagtaataattctgacccaatgggtaaagaaggagactttgtgtacaaagaagtcatcaaatcacctactgcctctcgcatctctcttgggaaaaaggtgaaatcagtgaaagagacgatgagaaagagaatgtctaaaaaatacagcagctctgtctctgagcaggactcgggccttgatggaatgcctggctcccctccgccttcacagcccgaccccgaacacttggacaagcccaagctcaaggccgggggttctgtagaaagtcttcgcagttctctcagtgggcagagctccatgagcggtgcaaacagtgagcaccactgattcctgcaaccagcaaccgggaaagcgtcaagtcggaagatggggatgacgaagagccgccttaccgaggcccgttctgcgggcgtgccagggtgcacaccgacttcacccccagtccctatgacacagactcactcaagctcaagaaaggagatatcatcgatataatcagcaagccacccatggggacctggatgggcctgctgaacaacaaagtcggcacgttcaagttcatctacgtggacgtgctcagtgaagacgaggagaaacccaaacgccccaccaggaggcgtcggaaaggacgaccaccccagcccaagtctgtggaggatctcctggatcggattaacctaaaaragcacatgcccactttcctgttcaatggatatgaagatttggacacctttaagctgctggaggaggaagacttggatgagttaaatatcagggacccggaacacagagctgttctcttgacagcagtggagctgttacaagagtatgacagtaacagcgaccagtcaggatcccaggagaagctgctcgttgacagccagggcctgagtggatgctcaccccgagactcaggatgctacgaaagcagtgagaacctggaaaacggcaagactcggaaagctagcctcctatctgccaagtcatccaccgagcccagcttgaagtcttttagcagaaaccagttgggcaattacccaacattgcctttaatgaaatcaggggatgcactgaagcagggacaggaggagggcaggctgggtggtggccttgccccagacacgtccaagagctgtgacccacctggtgtgactggtttgaataaaaaccgaagaagcctcccagtttccatctgccggagctgtgagaccctggagggcccccagactgtggacacttggccccgatcccattccctggatgaccttcaagtggagcctggtgctgagcaagacgtgcctaccgaggtgacagaaccgccccctcagattgtacctgaagtgccacagaagacgaccgcctcttccacgaaggcccagcccctggagcaagactctgctgtcgacaatgcattgctactgacccaaagcaagagattttctgaacctcagaaattgacaactaagaaactggagggctcaatcgcagcctctggtcgcggcctgtcaccccctcagtgtttgcccagaaactatgatgctcagcctcctggagctaaacacggtttagcaaggacgcctctggagggccacagaaaaggacacgagtttgaaggaacacaccatcccctgggcaccaaagaaggggtagatgctgagcagagaatgcagcccaaaattccatcacagcctccacctgttcctgccaaaaagagcagagaacgccttgctaacggactccaccctgttcccatgggccccagtggggccctccccagtcccgatgcgccatgcctgccagtgaaaaggggcagccccgccagccccaccagccctagcgactgtcccccagcactggctcccaggcctctctcagggcaggcgcctggcagcccaccaagcacaaggccgcccccctggctctcagagctccccgagaacacaagcctccaggagcacggtgtgaagctgggcccggctttgaccaggaaggtctcctgtgcccggggagtggatctagaaacgctcactgaaaacaagctgcacgctgaaggcatcgatctcacggaggagccgtattctgataagcatggccgctgtgggattcctgaagccctggtgcagagatacgcagaggacttggatcagcccgagcgggacgtcgccgccaacatggaccagatccgggtgaagcagcttcggaagcagcaccgcatggcgattccaagtggtggactcacggaaatctgccgaaagcccgtctctcctgggtgcatttcgtctgtgtcagattggctcatttccatcggtctgcccatgtacgccggcaccctctccaccgcgggcttcagcacactgagccaagtgccttctctgtctcacacttgccttcaggaggccggcatcacagaggagagacacataagaaagctcctatctgcagccagactcttcaaactgccgccaggccctgaggccatgtagccaggcccggaatgggcctctctggacaagagccaccctttcactgtgcatatgatgctgatgcaattcctccatcatctctggacgtgcagaccagatccagaagaaaggcctggcgtgtggccaaacagcgtgaaaccttggcacaggactgaggatcctctcctccagaaaagccccctcgaggaaataaattagtgcggttctctttgacctccaaagacaagacaagcacttatttttattttcagaagacaaaagaaccaagatgccaactggctgcgaatgctctatctccagtctgtctctgtgtactggtagaggctgggaggagtagggggcagcctgttccatttctgatagtgcccttgctcttctgtctgtcatcttgcaggatgcccgagggccagatgggcttagctaggccaaagtaacagactcaagagttattgtacattactgaccacgctcatttgttcaaaagttagaacatctggctgcaccaggaaaaaaaaaaaaaaaaaactcgagacc

SEQ ID NO: 543 - DNA, 541 bp, Homo sapiens
  SITE (44): n equals a,t,g, or c
aagcctggggtgtcctgaactctgcctgcttccccagccctgcnagtttccaaagaaggcgcttgaaaaggagaaacgaatcgctgctgctcttctaaaagccggttccctctctggtgtctgtggaccctgcttctraagtacatgaaaccttgagggaaaattgaccagttctagcagttctaaaatcatggctcgtgatttggtgatgttcagagatgtggctgtagacttttctcaggaagaatgggaatgcctgaactcatatcagaggaatttgtacagagatgtgatattagagaactatagcaacttggtgtcactgggatgttctatttctaagccagatgtgatcaccctattggaacaagggaaagagccctggrtggttgtgagggatgagaaaagaagatggactctaggccctaccttcaaataccatcaccttgggattcgtgtttcaacataggaattgttacgggaacacaaacattcagcccataacagattttatcaaagaagtacttcatgaaatgtaaaa

SEQ ID NO: 544 - DNA, 575 bp, Homo sapiens
ctctgcggattggggctccagctgactgacccgacagtgcgggtggcctagggggaggcgctcagagtaggaacccgggggtgcagacgggatctgccggatccccaggctcgtatttttatccaaaagaaggacctggaggaggatgagagcgttactgctgcacacctaaagtcaagggggagaagcccgaggaagattgaccarttttgtaattctagmaacatggtccatggatcagtgacattcagggatgtggccattgacttctctcaggaggagtgggagtgcctgcagcctgatcagaggaccttgtacagggatgtgatgttggagaactacagccacctgatctcactgggaagttccatttctaaaccagatgtaattacgttactagagcaagagaaagagccctggatggttgtaaggaaagaaacaagcagacggtatccagatttggagttaaaatatggacctgagaaagtatctccagaaaatgatacctctgaagtaaatttacccaaacaggttataaagcaaataagtacaaaaaaaaaaaaaaaaaaactcga

SEQ ID NO: 545 - DNA, 461 bp, Homo sapiens
  SITE (10): n equals a,t,g, or c
  SITE (165): n equals a,t,g, or c
  SITE (460): n equals a,t,g, or c
ggacgattcngggcagtgtcgtccccagaggtcggcggccgttgcccgctcaccagcgacgcggggcgcctgcggggacggacactgcccatctctaagataagagcctggaaagaggactctgttggctgttggaaattgcagagtaatgcctcaggtgacatntaatgatgtggctatagacttcactcatgaagagtggggatggctcagttctgctcagagggacttatacaaggatgtgatggtccagaattatgagaacctggtctctgtagcaggyctttctgtaactaagccatatgtgatcacgttattggaggatggaaaagagccctggatgatggagaaaaaactgtcaaaaggtatgattccagattgggaatcaagatgggaaaacaaggaattatcaacaaagaaggataattatgatgaagattcaccccaaacagtaataatng

SEQ ID NO: 546 - DNA, 572 bp, Homo sapiens
  SITE (3): n equals a,t,g, or c
  SITE (27): n equals a,t,g, or c
  SITE (516): n equals a,t,g, or c
  SITE (546): n equals a,t,g, or c
  SITE (552): n equals a,t,g, or c
  SITE (558): n equals a,t,g, or c
ggncccctcctgcctgcagaaagcccnacctaacactgacctgtcagcaaactctaaagaaacccaaaagtcaccatcagactgcaggccggagatacctgaggggaatctcagggctgggacataggcttaatttctgaggccccattctccagccatcctgactctgtttcttaggcggggaagtcataggttagggagcacctcacactttcctcaggagaagacacacaaccatgaccctcagcctggggaccccaactccaggccctccagccccaaacctgcccagccagccctgaaaatgcaagtcttgtacgagtttgaagctaggaacccacgggaactgactgtggtccagggagagaagctggaggttctggrccacagcaagcggtggtggctggtgaagaatgaggcgggacggagcggctacattccaagcaacatcctggagcccctacagccggggacccctgggacccagggccagtcaccctctcgggtactacccancctggactatccagagccctaagtcttganttggangtcggngtggggaggattca

SEQ ID NO: 547 - DNA, 872 bp, Homo sapiens
  SITE (865): n equals a,t,g, or c
  SITE (867): n equals a,t,g, or c
  SITE (870): n equals a,t,g, or c
gaagcacccttaggataccaggaccctgtttcccttcggagaagacacacaaccatgaccctcagcctggggaccccaactccaggccctccagccccaaacctgcccagccagccctgaaaatgcaagtcttgtacgagtttgaagctaggaacccacgggaactgactgtggtccagggagagaagctggaggttctggaccacagcaagcggtggtggctggtgaagaatgaggcgggacggagcggctacattccaagcaacatcctggagcccctacagccggggacccctgggacccagggccagtcaccctctcgggttccaatgcttcgacttagctcgaggcctgaagaggtcacagactggctgcaggcagagaacttctccactgccacggtgaggacacttgggtccctgacggggagccagctacttcgcataagacctggggagctacagatgctatgtccacaggaggccccacgaatcctgtcccggctggaggctgtcagaaggatgctggggataagcccttaggcaccagcttagacacctccaagaaccaggccccgctgatgcaagatggcagatctgatacccattagagccccgagaattcctcttctggatcccagtttgcagcaaaccccacaccccagctcacacagcaaaaacaatggacaggcccagagggtgaagcaaacagtgtcccttctggctgtgttggagcctccccagtaaccacctatttattttacctctttcccaaacctggagcatttatgcctaggcttgtcaagaatctgttcagtccctctccttctcaataaaagcatcttcaagcttgtaaaaaaaaaaanantanaa

SEQ ID NO: 548 - DNA, 1118 bp, Homo sapiens
  SITE (1117): n equals a,t,g, or c
ttgccaagaaaagacctcaccaaaaggtgtcgagaaccctgctgtacaagagagtaaccaaaaaatgttaggtcctcctttggrgtggctgaaaacgttagcctctaaaagaaatgctgttgcttttcgaagttttaacagtcatattaatgcatccaataactcagaaccatccagaatgaacatgacttctttagatgcaatggatatttcgtgtgcctacagtggttcatatcccatggctataacccctactcaaaaaagaagatcctgtatgccacatcagaccccaaatcagatcaagtcgggaactccataccgaactccgaagagtgtgagaagaggggtggcccccgttgatgatgggcgaattctaggaaccccagactaccttgcacctgagctgttactaggcagggcccatggtcctgcggtagactggtgggcacttggagtttgcttgtttgaatttctaacaggaattccccctttcaatgatgaaacaccacaacaagtattccagaatattctgaaaagagatatcccttggccagaaggtgaagaaaagttatctgataatgctcaaagtgcagtagaaatacttttaaccattgatgatacaaagagagctggratgaaagagctaaaacgtcatcctctcttcagtgatgtggactgggaaawtctgcagcatcagactatgcctttcatcccgcgcagccagatgatgaaacagatacctcctattttgaagccaggaatactgctcagcacctgaccgtatctggatttagtctgtagcacaaaaattktccttttagtctagcctcgtgttatagaatgaacttgcataattatatactccttaatactagattgatctaagggggaaagatcattatttaacctagttcaatgtgcttttaatgtacgttacagctttcacagagttaaaaggctgaaaggaatatagtcagtaatttatcttaacctcaaaactgtatataaatcttcaaagcttttttcatctatttattttgtttattgcactttatgaaaactgaagcatcaataaaattagaggacactattgaaaaaaaaaaaaaagggggggccnc

SEQ ID NO: 549 - DNA, 1807 bp, Homo sapiens
  SITE (3): n equals a,t,g, or c
ganggcatagaggaactgagtgatccctctgggcccaaatcctatagtataacagagaaacactatgcacaggaggatcccaggatgttatttgtagcagctgttgatcatagtagttcaggagatatgtctttgttacccagctcagatcctaagtttcaaggacttggagtggttgagtcagcagtaactgcaaacaacacagaagaaagcttattccgtatttgtagtccactctcaggtgctaatgaatatattgcaagcacagacactttaaaaacagaagaagtattgctgtttacagatcagactgatgatttggctwaagaggaaccaacttctttattccagagagactctgagactaagggtgaaagtggtttagtgctagaaggagacaaggaaatacatcagatttttgaggaccttgataaaaaattagcactagcctccaggttttacatcccagagggctgcattcaaagatgggcagctgaaatggtggtagcccttgatgctttacatagagagggaattgtgtgccgcgatttgaacccaaacaacatcttattgaatgatagaggacacattcagctaacgtattttagcaggtggagtgaggttgaagattcctgtgacagcgatgccatagagagaatgtactgtgccccagaggttggagcaatcactgaagaaactgaagcctgtgattggtggagtttgggtgctgtcctctttgaacttctcactggcaagactctggttgaatgccatccagcaggaataaatactcacactactttgaacatgccagaatgtgtctctgaagaggctcgctcactcattcaacagctcttgcagttcaatcctctggaacgacttggtgctggagttgctggtgttgaagatatcaaatctcatccattttttacccctgtggattgggcagaactgatgagatgaacgtaatgcagggttatcttcacacattctgatcttctctgtgacaggcatctccagcactgaggcacctctgactcacagttacttatggagcaccaaagcatttggataaagaccgttataggaaatgggggggaaatggctaaaagagaacaattcgtttacaattacaagatattagctaattgtgccagrggctgttatatacatatatacacaaccaaggtgtgatctgaatttaatccacatttggtgttgcagatgagttgtaaagccaactgaaagagttccttcaagaagttcctctgataggaagctagaagtgtagaatgaagttttacttgacagaaggacctttacatggcagctaacagtgctttttgctgaccaggattggtttatatgattaaattaatatttgcttaataatacactaaaagtatatgaacaatgtcatcaatgaaacttaaaagcgagaaaaaagaatatacacataatttctgacggaaaacctgtaccctgatgctgtataatgtatgttgaatgtggtcccagattatttctgtaagaagacactccatgttgtcagctttgtactctttgttgatactgcttatttagagaagggttcatataaacactcactctgtgtcttcaacagcatctttctttccccatctttctattttctgcaccctctgcttgttccctcatattctgttcttccgactcctgctaacacacatgcaacaaaaaagggaagggagtgcttatttccctttgtgtaaggactaagaaatcatgatatcaaataaacatggtgaaacattaaaaaaaaaaaaaa

SEQ ID NO: 550 - DNA, 865 bp, Homo sapiens
  SITE (683): n equals a,t,g, or c
  SITE (720): n equals a,t,g, or c
  SITE (781): n equals a,t,g, or c
  SITE (817): n equals a,t,g, or c
  SITE (827): n equals a,t,g, or c
  SITE (852): n equals a,t,g, or c
caagcccacgtgcaatgagctgatcaaaaccatcatcatccagcatgagaacatcttcccaagccccagggwgctggagggccctgtctacagcagaggaggaagcatggaggattactgtgatagccctcatggagagactacctcggttgaagactcaacccaggatgtgaccgcagagcaccacacgagcgatgacgaatgtgagcccatcgaggccattgccaagtttgactacgtgggccggacagcccgagagctrtcctttaagaagggagcatccctgctgctttaccagcgggcttccgacgactggtgggaaggccggcacaatggcatcgacggactcatcccccatcagtacatcgtggtccaagacaccgaggacggtgtcgtggagaggtccagccccaagtctgagattgaggtcatttctgagccacctgaagaaaaggtgacagccagagcgggggccagctgtcccagtgggggtcatgtagcccgatatttatcttgcaaacatcaacaagcaaaggaagcgtccagaatctgggaagcatccgaaaacttttcggagtgacagccatgggcttgagcagttccctgactgactcctccttcccaggggtgggggctagctgccgccatctccagccatcatgagccagagccttccaaagaanggccagataagtggttcattaatgggcacggagcctnaacttcattaaccgcaatcatccttgaagaatcggctggatagtccacagatccggaagantggcacaacgggaaggtcaaaaggttcaataccatnggccatgganccttaggcaatggtcaagatattgnggaacaatgaact

SEQ ID NO: 551 - DNA, 954 bp, Homo sapiens
  SITE (946): n equals a,t,g, or c
  SITE (954): n equals a,t,g, or c
cctcaaagagacccattctcatctttcttcagaagttacaaagaactggaatgaaatgacagagttggtctcctccaacggcaattactgcaattaccgcaagcctttgccgactgcgatggcttcaaaatccccatccttggagtacacttgaaagacttgatagctgtccatgtcattttcccagactggacagaggagaacaaagtgaacattgtgaaaatgcaccagctctccgttaccctgagtgaactagtctccctgcagaatgcctctcaccacttagaacccaacatggatttgatcaacctgctcacgctttctctggacctctatcacactgaagatgatatttacaaactgtcactggtgctggagcctagaaattctaaatcgcagcctacctcccctacgacgcccaacaagcctgtggtacccctggagtgggcattaggggtgatgccaaagccagaccccacggtcatcaacaagcacataaggaaattagtggagtctgtatttagaaactatgatcacgaccatgatgggtacatttcccaagaggactttgaaagtatagctgccaattttcccttcttggattccttctgtgttctggacaaagatcaggatggcctaattagtaaagatgaaatgatggcttacttcctgagagctaaatcccaactacactgttaaaatgggaccaggatttatccataattttcaggagatgacctatctcaagccaaccttckgcgaacactgtgcgggatttctctggggcataatcaagcaaggatacaaatgcaaagactgtggagccaattgtcacaaacagtgcaaagacctcctggttctggcctgcaggagatttgcccgggcgcccttcttgagcagtggtcatgggtcactggctggaagcccctcgctgcccccaccgcangatgaggn

SEQ ID NO: 552 - DNA, 916 bp, Homo sapiens
  SITE (884): n equals a,t,g, or c
  SITE (905): n equals a,t,g, or c
cgcaatggcacatctgaccccttcgtccgagtgcgctacaagggccggacacggagacctcgatcgtgaagaagtcatgctmcccacgctggratgagacgtttgaatttgagctgcaggagggggccatggaggcgctgtgcgtggaggcctgggactgggaccttgtcagccgaaacgacttcctgggcaaagtggtgattgatgtccagagactgcgggtggtgcagcaggaggagggctggttccggctgcagcccgaccagtccaagagccggcggcatgacgagggcaacctgggctccttgcagctggaggtgcggctgcgggacgagacggtgctgccctccagctactaccagccactggtgcacctgctgtgccacgaggtcaagctgggcatgcagggcccagggcagctgatcccactcatcgaggagacaaccagcaccgagtgtcgccaggacgtggccacgaacctgctcaagctcttcctggggcaggggctggccaaggacttcctggacctgctcttccagctggagctgagtcgcaccagtgagaccaacaccctgttccggagcaactctctggcctcaaagtccrtggagtcttttctgaaggtggccgggatgcagtacctgcacggcgtcctgggccccatcatcaacaaggtgtttgaggagaagaagtacgtggagctggaccccagcaaagtggaagttaaggatgtagggtgctccgggctgcaccgcccgcagaccgaggccgaggtgctggagcagagcgcgcagacgctgcgcgcccacctgggggccctgctgagcgcgctcagccgctcggttcgcgcgtgccccgccgtggtgcgcgscamcttycgccanctcttccggcgcgtgcgcgancgcttccccgg

SEQ ID NO: 553 - DNA, 392 bp, Homo sapiens
  SITE (46): n equals a,t,g, or c
  SITE (371): n equals a,t,g, or c
accctgccactcccagtaatttcctgcccaagaagacccccttggntgaagagatgacacccccacccaagcccccacgcctctacctcccccaggagccaacatccgaggagactccgcgcaccaaacgtccccatatggagcctaggactcgacgtgggccatctccaccagcctcccccaccaggaaaccccctcggyttcaggacttccgctgcttagctgtgctgggccggggacactttgggaaggtcctcctggtccagttcaaggggacagggaaatactacgscatcaaagcactgaagaagcaggaggtgctcagccgggacgagatagagagcctgtactgcgagaagcggattcctggnaggttgtggggttgcacaggg

SEQ ID NO: 554 - DNA, 567 bp, Homo sapiens
  SITE (236): n equals a,t,g, or c
  SITE (238): n equals a,t,g, or c
  SITE (542): n equals a,t,g, or c
  SITE (556): n equals a,t,g, or c
actcctgagctcaggcaatctgtccacctcgacctcccaaactgctaggattacaagcktgagacccagcctcatacttatttttaatatttaaaatgattttgcttttcttgtttcttagtgcatgtaaagaagtatctttgcctgctgtataactgtgtgtatctcattttcctcacagtacttattgattccatttacaaagtgactgagggccggcagtctgaaatattccncnttacaagctgaggggaacttcgaccccagctgctgcttcaccatctaccatggcaaccacatggagtccctggacctcatcacctccaaccccgaggaggcccgcacctggatcacaggcctcaagtacctgatggctggcatcagtgatgaagactcccttgccaaaaggcagaggacccatgaccaatgggtgaagcagacctttgaggaagctgataagaatggtgacggcttgctgaatattgaagagatacatcagctgatgcataaactgaatgttaatctgccccgaagaaaagtcngacaaatgtttcangaagccgacac

SEQ ID NO: 555 - DNA, 2174 bp, Homo sapiens
  SITE (24): n equals a,t,g, or c
  SITE (176): n equals a,t,g, or c
  SITE (1323): n equals a,t,g, or c
  SITE (1900): n equals a,t,g, or c
  SITE (1968): n equals a,t,g, or c
attcggcacgatgagatcctacancccgaggagattaagctgcaggaggccatgttcgagctggtcacttccgaggcgtcctactacaagagtctgaacctgctcgtgtcccacttcatggagaacgagcggataaggaagatcctgcacccgtccgaggcgcacatcctcttctncaacgtcctggactgctggctgtcagtgagcggttcctcctgggagctggagcaccggatggaggagaacatcgtcatctctgacgtgtgtgacatcgtgtaccgttatgcggccgaccacttctctgtctacatcacctacgtcagcaatcagacctaccaggagcggacctataagcagctgctccaggagaaggcagctttccgggagctgatcgcgcataggagctcgaccccaagtgcagggggctgcccttctcctccttcctcatcctgcctttccagaggatcacacgcctcaagctgttggtccagaacatcctgaagagggtagaagagaggtctgagcgggagtgcactgctttggatgctcacaaggagctggaaatggtggtraaggcatgcaacgagggcgtcaggaaaatgagccgcacggaacagatgatcagcattcagaagaagatggakttcaagatcaaktcggtgcccatcatytcccaytcccgytggytgytgaagcagggtgagytgcagcagwtktmaggccccaagacytcccggaccctgaggaccaagaagctcttccacgaaatttacctcttcctgttcaacgacctgctggtgatctgccggcagattccaggagacaagtaccaggtatttgactcagctccgcggggactgctgcgtgtggaggagctggaggaccagggccagacgctggccaacgtgttcatcctgcggctgctggagaacgcaratgaccgggaggccacctacatgctaaaggcgtcctctcagagtgagatgaagcgttggatgacctcactggcccccaacaggaggaccaagtttgtttcgttcacatcccggctgctggactgcccccaggtccagtgcgtgcacccatacgtggctcagcagccagacgagctgacgctggagctcgccgacatcctcaacatcctggacaagactgacgacgggtggatctttggcgagcgtctgcacgaccaggagagaggctggttccccagctccatgactgaggagatcttgaatcccaagatccggtcccagaacctcaaggaatgtttccgtgtccacaagatggatgaccctcagcgcagcagaacaaggaccgcangaagctgggcagccggaatcggcaatgacccccacccagggggccagcgggagcagggcctgcatgagaccccgacagaaggtggggggggggctctgggaagcacaggccagcacctccccaggtggcaggatctggcttggggtgcccggccctcatccctgcccacgcatrrgtgctcatgtgtcttggccccttgctygcaaactggataaagggtgcccaagcctctcctgatgcatttgtaaacaagaaggtttcagcagtattacaccacctccctcatgcctccgagggggtggaagggggtgggcacactccagggccccccatgcccctggcccccagggactggaagaggctcccaacccagagtgtccctgtgggaggcaggcagaaggtgacaattgacacgatttcctgcacgcgtcctcctctaccttggaagcagttagaatctaccaggcacagatgaggccgcccttgcctgacggagcttgatgagcagcccttggtctccggttccaggactgagagcccagctgcctctgcccacccttccccaggcctctgccancctctggctgcacggtcaggccctgccccatggcaggcctgccagagcttggctggggacccctcccncctctggctccctgatgggctggatgtaacttgtgtcttctagccscttaaggagcccaggtgttttaaggaatgaattggtcactgcatcttgtatcgattatggttctgagaaaagcaaatatcacttttggctgcattaaaagaagcatcatatataaaataaaraaaaaaaaaaaaaaaaaactcggggggggggcccggta

SEQ ID NO: 556 - DNA, 1493 bp, Homo sapiens
  SITE (1384): n equals a,t,g, or c
  SITE (1484): n equals a,t,g, or c
  SITE (1485): n equals a,t,g, or c
  SITE (1490): n equals a,t,g, or c
  SITE (1493): n equals a,t,g, or c
ggcacgaggtgttccagtagaatgtccccaacctgagaaaatccccaatggaatcattgatgtgcaaggccttgcctatctcagcacagctctctatacctgcaagccaggctttgaattggtgggaaatactaccaccctttgtggagaaaatggtcactggcttggaggaaaaccaacatgtaaagccattgagtgcctgaaacccaaggagattttgaatggcaaattctcttacacggacctacactatggacagaccgttacctactcttgcaaccgaggctttcggctcgaaggtcccagtgccttgacctgtttagagacaggtgattgggatgtagatgccccatcttgcaatgccatccactgtgattccccacaacccattgaaaatggttttgtagaaggtgcagattacagctatggtgccataatcatctacagttgcttccctgggtttcaggtggctggtcatgccatgcagacctgtgaagagtcaggatggtcaagttccatcccaacatgtatgccaatagactgtggcctccctcctcatatagattttggagactgtactaaactcaaagatgaccagggatattttgagcaagaagacgacatgatggaagttccatatgtgactcctcaccctccttatcatttgggagcagtggctaaaacctgggaaaatacaaaggagtctcctgctacacattcatcaaactttctgtatggtaccatggtttcatacacctgtaatccaggatatgaacttctggggaaccctgtgctgatctgccaggaagatggaacttggaatggcagtgcaccatcctgcatttcaattgaatgtgacttgcctactgctcctgaaaatggctttttgcgttttacagagactagcatgggaagtgctgtgcagtatagctgtaaacctggacacattctagcaggctctgacttaaggctttgtctagagaatagaaagtggagtggtgcctccccacgctgtgaagccatttcatgcaaaaagccaaatccagtcatgaatggatccatcaaaggaagcaactacacatacctgagcacgttgtactatgagtgtgaccccggatatgtgctgaatggcactgagaggagaacatgccaggatgacaaaaactgggatgaggatgagcccatttgcattcctgtggactgcagttcacccccagtctcagccaatggccaggtgagaggagacgagtacacattccaaaaagagattgaatacacttgcaatgaagggttcttgcttgagggagccaggagtcgggtttgtcttgccaatggaagttggagtggagccactcccgactgtgtgcctgtcagatgtgccacnccgccacaactggccaatggggtgacggaaggcctggactatggcttcatgaaggaagtaacattccactgtcacgagggctacatcttgcacggtgctnnaaagnacn

SEQ ID NO: 557 - DNA, 276 bp, Homo sapiens
ggcacaggggagcagtatgtggtggtagccaactaccagaagcaggagagttcggagatcagcctcagcgtggggcaggtggtggacatcatcgagaagaatgagtcaggttggtggttcgtcagcactgccgaggagcaaggctgggtccctgcaacgtgcctcgaagccaggwtggggtgcaggatgagttttctctgcagcctgaagaagaggagaagtacacagtcatctacccgtacacagctcgggaccaggatgaaatgaacctggaga

SEQ ID NO: 558 - DNA, 846 bp, Homo sapiens
ctcgtgccgaattcggcacgaggagaatcctattgtaaaatcacttgctaaggctcatgagaggctagaagattccaaactagaagctgtcagtgacaataacttggaattagtcaatgaaattcttgaagacatcactcctctaataaatgtggatgaaaatgtggcagaattggttggtatactcaaagaactcacttccagtcactgttggaggcccatgatattgtggcatcaaagtgttatgattcacctccatcaagcccagaaatgaataattcttctatcaataatcagttattaccagtagatgccattcgtattcttggtattcacraaagagctggggaamcactgggtgtgacatttagggttgaaaataatgatctggtaattgcccgaatcctccatgggggaatgatagatcgacaaggtctacttcatgtgggagatataattaaagaagtcaatggccatgaggttggaaataatccaaaggaattacaagaattactgaaaaatattagtgkaagtgtcaccctaaaaatcttaccaagttatagagataccattactcctcaacaggtatttgtgaagtgtcattttgattataatccatacaatgacaacctaataccttgcaaagaagcaggattgaagttttccaaaggagarattcttcagattgtaaatagagaagatccaaattggtggcaggctagccatgtaaaagagggaggaagcgctggtctcattccaagccagttcctggaagagaagagaaaggcatttgttagaagagactgggacaattcaggacctttttgtggaactataagtagcaaa

SEQ ID NO: 559 - DNA, 435 bp, Homo sapiens
  SITE (427): n equals a,t,g, or c
ctcgtgccgcaagaatatgctgccaaaattatcaacaccaaaaagctttctgctagggatcatcagaaactagaaagagaagctagaatctgccgtcttttgaagcaccctaatattgtgcgacttcatgatagcatatcagaagagggctttcactacttggtgtttgatttagttactggaggtgaactgtttgaagacatagtggcaagagaatactacagtgaagctgatgccagtcattgtatacagcagattctagaaagtgttaatcattgtcacctaaatggcatagttcacagggacctgaagcctgaggaatttgcttttagctagcaaatccaagggagcagctgtgaaattgggcagactttggsttwgccatagaagttcaaggggaccagccagcgtgggttttgggttttgntgggcaca

SEQ ID NO: 560 - DNA, 576 bp, Homo sapiens
  SITE (575): n equals a,t,g, or c
gggcccctattcaggaccattctgtggccgtgccagagtgcatacggatttcacgccaagtccctatgacactgactccctcaaaatcaagaaaggagacatcatagacattatttgcaaaacaccaatggggatgtggacaggaatgttgaacaataaagtgggaaacttcaaattcatttatgtggatgtcatctcagaagaggaagcagcccccaagaaaataaaggcaaaccgaaggagtaacagcaaaaaatccaagactctgcaggagttcctagagaggatcatctgcaggaatacacctcaacacttttgctcaatggttatgagactctagaagatttaaaagatataaaagagagtcacctcattgaattaaatattgaaaacccagatgacagaagaaggktactatcagctgctgaaaacttccttgaagaagaaagtaagtgtgtacacctactcttctccccagctgataatcagtttaatgkaaatagtataatcattagaaacaaagccccagtttatttactgrgawcatgaaagcacgcttttcccataaaataggna

SEQ ID NO: 561 - DNA, 929 bp, Homo sapiens
  SITE (897): n equals a,t,g, or c
  SITE (900): n equals a,t,g, or c
attaaattgaaagctgaagcccggttggacctgctaaagcagattggtgtttctgtggacacatggctaaagagtgccatgamccaagtaatggaagaactggaaaatgagcgatgggcccgccctcctgcagtgaccagtaatggcactttacactcgcttaatgcagataccgaaagagaagaaggcgaasagtttgaagataacatggatgttttcgatgacagcagttccagcccttctggcaccttaagaaattatccactcacctgcaaagttgtttattcctacaaggcttctcaaccagatgagttgaccattgaggaacatgaggtgttagaagtgattgaagatggagatatggaagactgggtaaaggctcgaaataaagttggccaagtgggttatgtgccagaaaagtacctacagtttcccacctcgaacagcctcctgagcatgctgcagtccctggccgctttggacagtcggtcacacacgtccagcaattccacggaagcagaactcgtttcaggcagcctcaacggagatgccagtggtaaagactgaaacaaggcactctttatttggtcacgtttgacctaaactgtattgccctggagtaagccttcagtaggataaaaagcacaactttcctcctgtcctataatatgcttttctttatatggtcacgtttgtcctgcacagtagaaccctaaagttaatcattcatcagtgagtaaaaaaattacaactttaatcctattctgtatgatgctcttttagttgtcatgtgagcataggggtggttgcaaaagcaaccggctgttaattatcttaccagatttgtttttctcttgctccctagtatgttttgtgaaagcactttatgattatganggncagacagatgatgagttatcttttcctga

SEQ ID NO: 562 - DNA, 615 bp, Homo sapiens
  SITE (574): n equals a,t,g, or c
  SITE (576): n equals a,t,g, or c
  SITE (596): n equals a,t,g, or c
  SITE (600): n equals a,t,g, or c
ggaactgtaaaatcctggacaccattggccgtggcacgttcagtgaggtccaggatcacatgctgattgggacccaaatggccatcaaaatcatccccaaggctggctcccttggcatcactctccagagagtgataagtrttttaaagttactctgtcacttcaatattgtacggttgtatcaagtgattgacacccccaacaccagttatttatttagtaacggagtatgcaagaggaggacacccacgcaaccaatacaccaccatggcctcatgagggaggagaaggcctagaccatgttcargcagattctgtcggccatgcagtagtgccatagcaaattgcgcagagacctgaacccagaaaacatcatccttgatgaggacggtaacktkaagatcgcagacttcggctttggtaccacattccatgatgggcagaagctgacagccctttgtagcacttaacccctacatggccctggaacgtttyctargycagggctaccaatgtgccaccatggatattcagagccttaaagtaaattttattaccacatggtgtcttgggngntcttgccctttctgcttatngcancattttagggtccct

SEQ ID NO: 563 - DNA, 1269 bp, Homo sapiens
  SITE (719): n equals a,t,g, or c
gcggacgcgtgggcggcggcgtccagggtcggcagcaaccgcagccgagcccgagcgggtggcggcgccatggcgtgcgcggggctgctcaccgtgtgcctgctccggccgcccgcgccccagccccagccccagaccccgcggcacccccagctcgcgcccgacccggggcccgccggacacacgctcttccaggacgttttccgcagagcagacaagaatgatgatgggaagctctcatttgaggaattccagaattactttgccgatggggttctcagcctgggggagctgcaggaactgttcagcggcattgatgggcatctcaccgacaatttagaaacagaaaaactgtgtgactacttctcagagcacctgggtgtctaccggccggtgctggctgcattggaatcgctgaaccgtgcagtgctcgctgccatggatgccaccaagctggagtacgagagggcctccaaagtggaccagtttgtgacrcgcttcctgctgcgggagacggtgagccagctgcaagcccttcagagctcgctggagggggcgtcagataccctggaggcccaggcccatggctggcggtcagatgcagagagcgtggaggcgcagagcaggctctgcggcagccggcgggcaggacgccgagccctgaggagtgtcagccggtcatccacctggtcccccggctcttctgacacagggcgcantcagaggccgagatgcagtggcggctccaggtgaaccgcctccaggagctcatcgaccagctcgagtgcaaggccccccggctggaacccctgcgtgaagaggacctggccaaggggcctgacttgcacatcctcatggcccagaggcaggtccaggtggcagaggaaggcctgcaggacttccaccgagccctgcgctgctatgtggacttcacaggggcccagagccattgtctgcatgtgtccgcccagaagatgctggacggtgcctccttcaccctgtatgagttctggcaggatgaggcctcctggagaaggcaccagcagtcgcctggcagcaaggccttccagcgcatcctcatcgaccactgcgggccccggacaccctcaccactgtgttcttcccagcctcctggtggataatgaataacaactgagccagacctgcacacgccgagggccccgggaccctgcctgcctctgaaccccaggtgggaccccagcacagaggcaataaaggcagtggtcccttccaaaaaaaaaaaaaaaa

SEQ ID NO: 564 - DNA, 382 bp, Homo sapiens
  SITE (266): n equals a,t,g, or c
  SITE (297): n equals a,t,g, or c
  SITE (337): n equals a,t,g, or c
gaatatcccacacttcaaaaagactttagaagaacaacgtatgccaacagtagcctcataaagtacatggagaaacacaaggtcaagcctgacagcaaagtgttcctcttgcttcagaaactcctgaccatggatccaaccaagagaattacctcggagcaagctctgcaggatccctattttcaggaggaccctttgccaacattagatgtatttgccggctgccagattccataccccaaacggaggaattccttaatggaagntgatcctggaaggaaaaaggtggacaaggantcagcaacagcagcagaacccagcatcagcagcccacagncccttccacagcagggcagcagcccctttccacaggggggcccca

SEQ ID NO: 565 - DNA, 1661 bp, Homo sapiens
gcggacgcgtgggcggacgcgtgggcggacgcgtgggtgagtccagtgagccgacagtccataagaaactcccagaagcacagccccacttcagagcccacccccccgggggatgccctaccaccagtcagctccccacatactcacaggggctaccagccaacaccagccatggccaagtacgtcaagatcctgtatgacttcacagcccgaaatgccaacgagctatcggtgctcaaggatgaggtcctagaggtgctggaggacggccggcagtggtggaagctgcgcagccgcagcggccaggcggggtacgtgccctgcaacatcctaggcgaggcgcgaccggaggacgccggcgccccgttcgagcaggccggtcagaagtactggggccccgccagcccgacccacaagctacccccaagcttcccggggaacaaagacgagctcatgcagcacatggacgaggtcaacgacgagctcatccggaaaatcagcaacatcagggcgcagccacagaggcacttccgcgtggagcgcagccagcccgtgagccagccgctcacctacgagtcgggtccggacgaggtccgcgcctggctggaagccaaggccttcagcccgcggatcgtggagaacctgggcatcctgaccgggccgcagctcttctccctcaacaaggaggagctgaagaaagtgtgcggcgaggagggcgtccgcgtgtacagccagctcaccatgcagaaggccttcctggagaagcagcaaagtgggtcggagctggaagaactcatgaacaagtttcattccatgaatcagaggaggggggaggacagctaggcccagctgccttgggctggggcctgcggaggggaagcccacccacaatgcatggagtattatttttatatgtgtatgtattttgtatcaaggacacggagggggtgtggtgctggctagaggtccctgcccctgtctggaggcacaacgcccatccttaggccaaacagtacccaaggcctcagcccacaccaagactaatctcagccaaacctgctgcttggtggtgccagccccttgtccaccttctcttgaggccacagaactccctggggctggggcctctttctctggcctcccctgtgcacctggggggtcctggcccctgtgatgctcccccatccccacccacttctacatccatccacaccccagggtgagctggagctccaggctggccaggctgaacctcgcacacacgcagagttctgctccctgaggggggcccgggaggggctccagcaggaggccgtgggtgccattcgggggaaagtgggggaacgacacacacttcacctgcaagggccgacagmaggggacaccgtgccggcttcagacactcccagcgcccactcttacaggcccaggactggagctttctctggccaagtttcaggccaatgatccccgcatggtgttgggggtgctggtgtgtcttggtgcctggacttgagtctcaccctacagatgagaggtggctgaggcaccagggctaagcaattaaaccagttaagtctcccaaaaaaaaaaaaaaaaaaaaaaaaaaaaaaaaaaaaaaaaaaaaaaaaaaaaaaaaaaaaaaaaaaaaaaaaaaaaaa

SEQ ID NO: 566 - DNA, 919 bp, Homo sapiens
  SITE (151): n equals a,t,g, or c
  SITE (859): n equals a,t,g, or c
  SITE (908): n equals a,t,g, or c
  SITE (918): n equals a,t,g, or c
ctcgtgccggacgacgctgcggtctttggggcttgctcctacctgccaggcgcggcctcccgctggctccctggccgcgcggcgcctcctccaggccccagcacaccctgccaaccccaccgccgcggctgcccccaccgggaccgaaganctacctgtgcaccctgcctccggctctcctgagcagagagatcctgatggctgactcagaagcactcccctcccttgctggggacccagtggctgtggaagccttgctccgggccgtgtttggggttgttgtggatgaggccattcagaaaggaaccagtgtctcccagaaggtctgtgagtggaaggagcctgaggagctgaagcagctgctggatttggagctgcggagccagggcgagtcacagaagcagatcctggagcggtgtcgggctgtgattcgctacagtgtcaagactggtcaccctcggttcttcaaccagctcttctctgggttggatccccatgctctggccgggcgcattatcactgagagcctcaacaccagccatgtcactactccatccagaagggagctgcgtttctgggacttggcaccgacagtgtccgagtggtcaaggctgatgagagagggaaaatggtccccgaggatctggagaggcagattggtatggccgaggctgagggtgctgtgccgttcctggksagtgccacctctggcaccactgtctaggggcctttgaccccctggaggcaattgctgatgtgtgccagcgtcatgggctatggctgcatgtggatgctgmctggggtgggagcgtcctgctgtcacagacacacaggcatcctcctggaattggatccagangggctgactctgtggcctggaatcccacaagctcctcgcagcaggcctnaatgctctgng

SEQ ID NO: 567 - DNA, 1380 bp, Homo sapiens
  SITE (1325): n equals a,t,g, or c
  SITE (1369): n equals a,t,g, or c
gatttagtctggaagctcttcaaacaatacataaacaaatggatgatgacaaagatggtggaattgaagtagaggaaagtgatgaattcatcagagaagatatgaaatataaagatgctactaataaacacagccatctgcacagagaagataaacatataacgattgaggatttatggaaacgatggaaaacatcagaagttcataattggacccttgaagacactcttcagtggttgatagagtttgttgaactaccccaatatgagaagaattttagagacaacaatgtcaaaggaacgacacttcccaggatagcagtgcacgaaccttcatttatgatctcccagttgaaaatcagtgaccggagtcacagacaaaaacttcagctcaaggcattggatgtggttttgtttggacctctaacacgcccacctcataactggatgaaagattttatcctcacagtttctatagtaattggtgttggaggctgcwggtttgcttatacgcagaataagacatcaaaagaacatgttgcaaaaatgatgaaagatttagagagcttacaaactgcagagcaaagtctaatggacttacaagagaggcttgaaaaggcacaggaagaaaacagaaatgttgctgtagaaaagcaaaatttagagcgcaaaatgatggatgaaatcaattatgcaaaggaggaggcttgtcggctgagagagctaagggagggagctgaatgtgaattgagtagacgtcagtatgcagaacaggaattgsaacaggttcgcatggctctgaaaaaggccgaaaaagaatttgaactgagaagcagttggtctgttccagatgcacttcagaaatggcttcagttaacacatgaagtagaagtgcaatactacaatattaaaagacmaaacgctgaaatgcagctagctattgctaaagatgaggcagaaaaaattaaaaagaagagaagcacagtctttgggactctgcacgttgcacacagctcctccctagatgaggtagaccacaaaattctggaagcaaagaaagctctctctgagttgacaacttgkttacgagaacgactttttcgctggcaacaaattgagaagatctgtggctttcagatagcccataactcaggactccccagcctgacctcttccctttattctgatcacagctgggtggtgatgcccagagtctccattccaccctatccaattgctggaggagttgatgacttagatgaagacacacccccaatagtgtcacaatttcccggkaagtggctaaacctcctggatcattagccngaagcagcagcctgtgccgttcacgccgcagcattgtgccgtcntcgcctcagcc

SEQ ID NO: 568 - DNA, 593 bp, Homo sapiens
  SITE (569): n equals a,t,g, or c
  SITE (586): n equals a,t,g, or c
  SITE (588): n equals a,t,g, or c
ctgcaggtaccggtccggaattcccgggtcgacccacgcgtccggaaggtgctccccctctctgtgacatgcatccaatgagagcactgtttctcattcccagaaaccctcctccccgggctgaagtcaaaaaaatggtcgaagaagttttttagttttatagaagggtgcctggtgaagaattacatgcagcggccctctacagagcagcttttgaaacatccttttataagggatcagccaaatgaaaggcaagttagaatccagcttaaggatcatatagatcgtaccaggaagaagagaggcgagaaagatgaaactgagtatgagtacagtgggagtgaggaagaagaggaggaagtgcctgaacaggaaggagagccaagttccattgtgaacgtgcctggtgagtctactcttcgccgagatttcctgagactgcagcaggagamcaaggaacgttccgaggctcttcggagacaacagttactacaggagcaacagctccgggagcaggaagaatataaaaggcaactgctggcagagagacagaacggattgagcagcanaaagaacagaggcgacngntagaa

SEQ ID NO: 569 - DNA, 887 bp, Homo sapiens
  SITE (201): n equals a,t,g, or c
  SITE (715): n equals a,t,g, or c
  SITE (786): n equals a,t,g, or c
  SITE (805): n equals a,t,g, or c
  SITE (824): n equals a,t,g, or c
  SITE (863): n equals a,t,g, or c
gcccggattgcccgagacttgcagggatccccagagcacaagactaaacctggaaaagccccagaaaaatcgagagagttttccccctacatcgacatcaatggtacttgtgacaagctgactcccttctggttcaccctctggagccaacggggaaagtgtgaagaccagaaggtggaatgcctgtacgaggcgctgaanagagctggagacaggctcctgggctccttccccacggccgtgcctctggctctccactcctccatcagctacctcggcttcttcgtcagtggcagccccgcagacgtcatccgggaattcgccatgaccttcgccacggaagcatctctcttarcagactgctccgtgaagccttgcaccaaacagctgcatctgaccttggcccacaagttctacccccaccaccagaggacgctggagcagctggccagagccatccccctgggccacagctgccagtggaccgcagcactctactcccgagacatgcgctttgtgcactaccagaccctgagagccctattccagtacaaaccccagaacgtggatgagctgacgctaagtcctggtgactacatctttgtggaccccacgcagcaggacgaagccagcgagggctgggtgattgggatctcacagcggacgggctgccggggcttcctgccggaaaattacacgggttcgagccagtgantttggacacgtgggtgaagcacaggatgttacaccttcagtctaagccacagacctgaattccagaaaggntggtgaagccagcagcagntgcagcgggggatttcttncacaaacggcaaagatcttagcagtttacaaggctttgnaggttacgtttgcaaggaagaatt

SEQ ID NO: 570 - DNA, 833 bp, Homo sapiens
  SITE (816): n equals a,t,g, or c
gaccgcacggggtatggtccccgggtccgagggcccggcccgcgccgggagcgtggtggccgacgtggtgtttgtgattgagggtacggmcaacctgggaccctacttcgaggggctccgcaagcactacctgctcccggccatcgagtattttaatggtggtcctcctgctgagacggacttcgggggagactatggggggacccagtacagcctcgtggtgttcaacacagtggactgcgctcccgagtcctacgtacaatgtcacgctcccaccagcagcgcctatgagtttgtcacctggctcgatggcattaagttcatgggcgggggtggtgagagctgcagcctcatcgcggaaggactcagcacagccttgcagctgtttgatgacttcaagaagatgcgcgagcagattggccagacgcaccgggtctgcctcctcatctgcaactcacccccatacttgttgcctgctgttgagagcaccacgtactctggatgcacaactgagaatcttgtgcarcarawtggggarcgggggatccacttytccattgkgkctccccggaagctgcctgcgcttcggcttctgtttgagaaggcagcccccccggccttgytggakccgctgcarcctccgacagatgtgagccaggacccgaggcacatggkgctggttcggggactcgtgctgcctgttgggggtggctcagccccaggccccctccagtcaaagcagccagcccccctgcctcccgccgcaccctcaggtgccactctctcagcagccccccagcagcctctgccccccgngcccccgcagtaccagg

SEQ ID NO: 571 - DNA, 857 bp, Homo sapiens
  SITE (291): n equals a,t,g, or c
  SITE (295): n equals a,t,g, or c
  SITE (753): n equals a,t,g, or c
cacttaacaaatgtttcaaatcactccaagcagaacctgatgactgtggcaaacttaggagtggtgtttggaccaactctgatgaggccacaggaagaaactgtcgctgccctcatggacttgaagtttcagaatattgttgtggaaatcttaattgaaaaccatgaaaagatttttcggacgccgcccgatactacattccctgagcccacctgcctgtcagcatcacccccaaatgcgccaccaaggcagtcgaagagacaaggccagagaaccaagaggcccgtggcntkcntacaatctttgtctggagctggaagatggtgacaatccttacccttccaaggaggacacccctaccagcagtctggactcactttcctccccgtctcccgtgactacagctgtccctgggcctcctggaccagacaaaaaccaccttctggcagatggagggagctttggagactgggcatccactatcccaggccagacccgatcgtctatggtccagtggcttaacccacagtctccaaccacaacaagctccaactcagctgtgacacctctttcacccgggtcgtcccctttccccttttctcctcctgctactgtagcggacaagccacctgaaagcatccgcagtcggaaggctcgagccgtgtatccgwgwgaagcagaacacagctcggaattatcttttgaaataggagcaatttttgaggatgtacaaacctccagggaacctggctnggctagaagggactctgaacggcaagagggggctgattccacagaactacgtcaagctgctgtagctcctggcctcagagcccctgctgaccctggcacccagg

SEQ ID NO: 572 - DNA, 300 bp, Homo sapiens
  SITE (282): n equals a,t,g, or c
  SITE (294): n equals a,t,g, or c
  SITE (298): n equals a,t,g, or c
gccgacgcgcccaaggaccctgtgcctgccctgcccacacacccccctgcccaggagcaggactgcgtggtggtcatcacccgagaggtgccacatcagaccgcctccgacttcgtgcgggactcggcggccagccaccaggcggagcccgaggcgtacgagcggcgcgtgtgcttcctgcttctgcaactctgcaacgggctggagcacctgaaggagcacgggatcatccaccgggacctgtgcctggagaacctgctgctggtgcactgcaccctccangtcggcccggcncggnta

SEQ ID NO: 573 - DNA, 509 bp, Homo sapiens
  SITE (487): n equals a,t,g, or c
gaaaacctgagaatattttagtatcccagtcaggaattactaagctctgtgattttggttttgcacgaacactagcagctcctggggacatttatacggactatgtggccacacgctggtatagagctcccgaattagtattaaaagatacttcttatggaaagtatgtgtattttgggatcctgtcagcctttcctagacctgtggatatctgggctttgggctgtatgatcattgagatggccactggaaatccctatcttcctagtagttctgatttggatttactccataaaattgttttgaaagtgggcaatttgtcacctcacttgcagaatatcttttccaagagccccatttttgctggggtagttcttcctcaagttcaacaccccaaaaatgcaagaaaaaaatatccaaagcttaatggattgttggcagatatagtycatgcttgttacaattgatcctgctgacaggatatcanctatgaacttttgcatcatgat

SEQ ID NO: 574 - DNA, 429 bp, Homo sapiens
  SITE (343): n equals a,t,g, or c
  SITE (390): n equals a,t,g, or c
  SITE (424): n equals a,t,g, or c
gatcgtgaagctctttgaggtgattgagactgagaagacgctgtacctggtgatggagtacgcaagtgctggagaagtgtttgactacctcgtgtcgcatggccgcatgaaggagaaggaagctcgagccaagttccgacagattgtttcggctgtgcactattgtcaccagaaaaatattgtacacagggacctgaaggctgagaacctcttgctggatgccgaggccaacatcaagattgctgactttggcttcagcaacgagttcacgctgggatcgaagctggacacgttctgcgggagccccccatatgccgcccggactgtttcagggcaagaagtnccacggccggaagtggacattggacctgggaatcatctgtcaccctngtcagcggttcctgccttcacggcacaacctaangactg

SEQ ID NO: 575 - DNA, 734 bp, Homo sapiens
ggttggtccagaagaaagatacaggccatatctatgcaatgaagatattgagaaagtctgatatgcttgaaaaagagcaggtggcccatatccgagcagaaagagatattttggtaraagcagatggtgcctgggtggtgaagatgttttacagttttcaggataagaggaatctttatctaatcatggaatttctccctggaggtgacatgatgacattgctaatgaagaaagacwccttgacagaagaggaaacacagttctacatttcagagactgttctggcaatagatgcgatccaccagttgggtttcatccatcgggatattaagccagacaaccttttattggatgccaagggtcatgtaaaattatctgattttggtttatgtacgggattaaagaaagctcacaggactgaattttatagaaatctcacacacaacccaccaagtgacttctcatttcagaacatgaactcaaagaggaaagcagaaacttggaagaagaacaggagacaactggcatattccacagttgggacaccagattacattgctccagaagtattcatgcagactggttacaacaaattgtgtgactggtggtctttgggagtgattatgtatgaaatgctaataggatatccacctttctgctctgaaacacctcaagagacatacagaaaagtgatgaactggaaagaaactctggtatttcctccagaggtacct

SEQ ID NO: 576 - DNA, 422 bp, Homo sapiens
  SITE (98): n equals a,t,g, or c
  SITE (366): n equals a,t,g, or c
  SITE (394): n equals a,t,g, or c
tttacccggcagttggagccagagaggaccgaatgagccacccctccggaccctattcccaagcatctgcagctgccccccagcctgctgcagcccgncagccaccacccccagaggaggaggaagaggaagccaacagctacgattcggatgaagcaaccaccctgggtgccctggaattcagccttctctacgaccaggacaacagctccctgcagtgcaccatcattaaggccaagggcctgaagcccatggattcaaatggcttggctgatccctacgttaagctgcacctcctgccgggagccagcaagtccaacaagcttcgtacaaaaactctgcgggattacccggatccccatctgngaatgaggaccctcgtgttttcacgggnattcaccgatggaggacatggcaaaagg

SEQ ID NO: 577 - DNA, 520 bp, Homo sapiens
  SITE (421): n equals a,t,g, or c
  SITE (512): n equals a,t,g, or c
gctggcgacgtcatcaaagtcttggatgcttccaacaaggattggtggtggggccagatcgacgatgaggagggatggtttcctgccagctttgtgaggctctgggtgaaccaggaggatgaggtggaggaggggcccagcgatgtgcagaacggacacctggaccccaattcagactgcctctgtctggggcgggcactacagaaccgggaccagatgcgggccaatgtcatcaatgagataatgagcactgagcgtcactacatcaagcacctcaaggatatttgtgagggctatctgaagcagtgccggaagagaagggacatgttcagtgacgagcaactgaaggtaatctttgggaacattgaagatatctacagatttcagatgggctttgtgagagacctggagaaacagtatnacaatgatgacccccacctcagcgagataggaccctgcttcctagagcaccaagtagaattcagcttggacttaaccaggctgaacttgcnaaaggggg

SEQ ID NO: 578 - DNA, 851 bp, Homo sapiens
  SITE (1): n equals a,t,g, or c
  SITE (51): n equals a,t,g, or c
  SITE (846): n equals a,t,g, or c
nggtgacactatagaaggtacgcctgcaggtaccggtccggaattcccggntcgacccacgcgtccggttaatggaggggagctttttttccacttacaaagagaacggtcctttcctgagcacagagctaggttttacgctgctgaaattgctagtgcattgggttacttacattccatcaaaatagtatacagagacttgaaaccagaaaatattcttttggattcagtaggacatgttgtcttaacagattttgggctttgtaaagaaggaattgctatttctgacaccactaccacattttgtgggacaccagagtatcttgcacctgaagtaattagaaaacagccctatgacaatactgtagattggtggtgccttggggctgttctgtatgaaatgctgtatggattgcctcctttttattgccgagatgttgctgaaatgtatgacaatatccttcacaaacccctaagtttgaggccaggagtgagtcttacagcctggtccattctggaagaactcctagaaaaagacaggmaaaatcgacttggtgccaaggaagactttcttgaaattcagaatcatcctttttttgaatcactcagctgggctgaccttgtacaaaagaagattccaccaccatttaatcctaatgtggctggaccagatgatatcagaaacttygacacagcatytacagaagaaacagtkccatattctgtgtgtgtatcttctgactattctatagtgaatgccagwgtattggaggcagatgatgcattcgttggtttctcttatgcacctccttcagaagacttatttttgtgagcagtttgccattncaggt

SEQ ID NO: 579 - DNA, 601 bp, Homo sapiens
  SITE (574): n equals a,t,g, or c
  SITE (597): n equals a,t,g, or c
cttttttttttttttttgatctttttgctgattttattatactatatagatttgtatttcttgtgatctgagaaacatcaaaattctattttaaatttgttcttaaaaatatacaatattgcactttaatttttggcagcttaacaggaatgaatgagtacaaaaaatcatacaagaaactagaatttttattttgcttcataataagagctttgtgaaaaacaaaacttacagtagtgccaaataaaccaaatatttacagtatagatattaaagtcttacctctaaaggaagattcagtgtattggatgtaaatattattaatataagaaaagtcacccccactgcccaattctgctgaacattttaagccaaagagtattggtgagaaatgcttctgtgatttctttctcaagacatacatggaagggatgcttgttcttggagcatctaaagtgggtcattaaacttttacaaaaatgtttcctccataacttaaaaaaaacctctactctaagccaagaatccaaggtaagcttattttttaatttttaaaggtcctccggtagttacncccccctttttttaaaataaatngaat

SEQ ID NO: 580 - DNA, 586 bp, Homo sapiens
gccgggatctctacacagggctgaaggctgggctgaccctggagacacgtttgcagatagcactagatgtggtggagggaatccgcttcctgcacagccagggacttgtccatcgtgatatcaaactgaaaaatgtgctgctggataagcagaaccgtgccaagatcactgacttaggattctgcaagccagaggccatgatgtcaggcagcattgtggggacaccaatccatatggcccctgaacttttcacaggggctcgcccagaacgtcttcctgtgtttgatgaggagtgctggcagttgatggaagcctgttgggatggcgaccccttgaagaggcctctcttgggcattgtccagcccatgctccagggcatcatgaatcggctctgcaagtccaattctgagcagccmaacagaggactagatkattctacttgaaagcaaagacctttctctttcactctctagttatttccttccccytmaccttttgccatggggagaatttgacatttattcactatwggacacctcccmagggaactggtgcttgctgggaaacttggaacttccaggcggga

SEQ ID NO: 581 - DNA, 511 bp, Homo sapiens
  SITE (489): n equals a,t,g, or c
  SITE (507): n equals a,t,g, or c
tgcaggtaccggtccggaattcccgggtcgacccacgcgtccgctttgcctgactcagggcagctcagagtgtggggcagaaggtgaccagccagctcagggcaggagatgcagagcacagccaattacctgtggcacacagatgacctgctggggcagggggccactgccagtgtgtacaaggcccgcaacaagaaatccggagagctggttgctgtgaaggtcttcaacactaccagctacctgcggccccgcgaggtgcaggtgagggagtttgaggtcctgcggaagctgaaccaccagaacatygtcaagctctttgcggtggaggagacgggcggaagccggcagaaggtactggtgatggagtactgctccagtgggagcctgctgagtgtgctggagagccctgagaatgcctttgggctgcctgaggatgagttcctggtggtgctgcgctgtgtggtggccgcatgarccmctccctgnccctgcctccaccctcanacca

SEQ ID NO: 582 - DNA, 1393 bp, Homo sapiens
  SITE (1389): n equals a,t,g, or c
caaccccagcagcatggctgtatcctttacctcggggtcttgccagaagcagcctcaagatgcatctcctccgccaaaagaatgtgaccaaggaactctcagtgcatccctaaatccgagtaattcagagagtagtccttccagatgcccttcagacccagactctacctcccagccaaggtcaggggcctctgcagatgtagctagagaygtmaagcaacccactgccacgccgaggagctaccggaacttcaggcatccagaaatagttggctactccgtaccaggacgaaatgggcaaagtcaagacctcgtcaaaggatgtgcaagaacagcccaggctccggaagacagaagtacagagccagatggcagtgaggcagaaggcaaccaggtctattttgctgtctacaccttcaaggcacgaaacccaaatgagctgagcgtgtcagccaatcagaaactcaagatcctcgagtttaaagatgttacaggaaatacagagtggtggttagctgaggttaacgggaagaagggctacgttccctccaattatatccgcaaaaccgagtacacctgagcccacgttgcctgccacccagccttgctgcctttgctttcagtccgccgagggttctggcggcccaccgagagggcgcctgctcctgagacacaggccctgtctgcgttgcttaaccatggcatggtggagcacaccacagatcttgttctcctcgattgggttgtaaaccttgatgctcactagaatctctagaatttgaaatggaccctggggctttgcaaatgacttagtgactatgagaagagagacaagtcttrgagctggcttttggaaaggagaaacttgcagtcagaagcccagtgtcctatgtatgcaggaagctgtgctctagcaatagacagtgttggtaatggttgtgctgtacggcgtttggggtggccccatgttccatgctcagctgaccggatgccaactcagatgaaaagaattcatggctctgggcaccccgtgagcagtgcttgcacatggctgggagtttgtcgggattgaaccaaacctagtgcttcaaagctcctgggacacctccagtgtccagcacacattctcatacatactgcccctaatttctaaagtccctaaagcactacattctgtaaccttgtttcttttactccattcccagattagttatgcaaaattcaactgcgttctacttttagaagtgtttagggtctttattttctgttgacccttcatctgaaagattctcttcccttgttaggtacaatcamtggccccccccttttttttgagaggggtctgctawgttgccaggckggtctaaamgcckgggytcaagcaacctnccgg

SEQ ID NO: 583 - DNA, 941 bp, Homo sapiens
  SITE (6): n equals a,t,g, or c
  SITE (94): n equals a,t,g, or c
  SITE (112): n equals a,t,g, or c
  SITE (832): n equals a,t,g, or c
  SITE (849): n equals a,t,g, or c
  SITE (909): n equals a,t,g, or c
tgtttngacttccatagaagacaccgggaccgatccagcttccggattttagcttaggccgggggacggataacaatttcacacaggaaacagntatgaccactaggctttngcaaaaagcttttaggtgacactatagaaggtacgcctgcaggtaccggtccggaattcccgggtcgacccacggtccggtaccccgccggggcgaccgcccggcgcctggcccggggctgctggtccgccctctgggactacgagacgcccaaggtgatcgtggtgaggaaccggcgcctgggggtcctgtaccgcgccgtgcagctgctcatcctgctctacttcgtgtggtacgtattcatcgtgcagaaaagctaccaggagagtgagacgggccccgagagctccatcatcaccaaggtcaaggggatcaccacgtccgagcacaaagtgtgggacgtggaggagtacgtgaagccccccgaggggggcagcgtgttcagcatcatcaccagggtcgaggccacccactcccagacccagggaacctgccccgagagcataagggtccacaacgccacctgcctctccgacgccgactgcgtggctggggagctggacatgctgggaaacggcctgaggactgggcgctgtgtgccctattaccaggggccctccaagacctgcgaggtgttcggctggtgcccggtggaagatggggcctctgtcagccaatttctgggtacgatggccccaaatttcaccatyctyatcaagaacagcatycactaccccaaattycacttctccaagggcaacatcgycgaccgsacaracnggtacctgaagcgstknacgttcacgaggcctycgacctytactgccccatcttcaagtggctttatcgtggagaangctggggagagcttcacagagctcgcacacaa

SEQ ID NO: 584 - DNA, 362 bp, Homo sapiens
gtatgttgtgacttctaagggaagagtctgggcagattcraggttacaacgcctgtrgggtggggtggggtggggttcccagggcccaagaccgggagcagagccctcagagctcagctggcttgggttccaggtggctgtgagaggtgatgggaagtgagcagccctgtaggtaccagctggggaggaggtgtcaggggctgtatgccagggtggggcacaagcctggggccagagcgtgcccccagcccttgcacagggatcctgtgttgccccgtttcgtggagatgctccgctactgaggtgcccacgtccacgtgcaggtccctagctggggactctctggccccaccaggccgggt

SEQ ID NO: 585 - DNA, 489 bp, Homo sapiens
  SITE (424): n equals a,t,g, or c
  SITE (441): n equals a,t,g, or c
  SITE (449): n equals a,t,g, or c
taggaacgccgtaccagccgcgtctctcaggacagcaggcccctgtccttctgtcgggcgccgctcagccgtgccctccgcccctcaggttctttttctaattccaaataaacttgcaagaggactatgaaagattatgatgaacttctcaaatattatgaattacatgaaactattgggacaggtggctttgcaaaggtcaaacttgcctgccatatccttactggagagatggtagctataaaaatcatggataaaaacacactagggagtgatttgccccggatcaaaacggagattgaggccttgaagaacctgagacatcagcatatatgtcaactctaccatgtgctagagacagccaacaaaatattcatggtcttgagtactgccctggaggagagctgtttgactatataatttnccaggatccgctgtcanaaaaaganaacccgggttggcttccgcaaataggaatctgcttggtgg

SEQ ID NO: 586 - DNA, 454 bp, Homo sapiens
ccacccaagaaacctactcccctaccaaagccagtaatttattgagatcttctggaacagtgtacccaaagcgacctgaaaaaccagttcctccaccacctcctatagccaagattaatggggaagtttctagcatttcatcaaaatttgaaactgagccagtatcaaaactaaagctagattctgaacagctgccccttagaccaaaatcagtagactttgattcacttacagtaaggacctccaaagaaacagatgttgtaaattttgatgacatagcttcctcagaaaacttgcttcatctcactgcaaatagaccaaagatgcctggaagaaggttgccgggccgtttcaatggtggacattctccaactcwcagccccgaaaaaatcttgaagttaccaaaagaagaagrcagtgccaacctgaagccatctgaaaaaaaaaaaaaaag

SEQ ID NO: 587 - DNA, 662 bp, Homo sapiens
  SITE (526): n equals a,t,g, or c
  SITE (602): n equals a,t,g, or c
  SITE (627): n equals a,t,g, or c
  SITE (643): n equals a,t,g, or c
  SITE (658): n equals a,t,g, or c
ggccgccgccgggactagaagtgagccgcccgggtcccaaacgccagccagccagtcagtgggtcccgcagtcgcccgcaaccggggcgaatcatggcggccgccaaggtggctttaaccaagagagcagatccagctgagcttagaacaatatttttgaagtatgcaagcattgagaaaaacggtgaatttttcatgtcccccaatgactttgtcactcgatacttgaacatttttggagaaagccagcctaatccaaagactgtggaacttttaagtggagtggtggatcagaccaaagatggattaatatcttttcaagaatttgttgcctttgaatctgtcctgtgtgcccctgatgctttgtttatggtagcctttcagctgtttgacaaagctggcaaaggagaagtaacttttgaggatgttaagcaagtttttggacagaccacaattcatcaacatattccatttaactgggattcagaatttgtgcaactacattttggaaaaraaaraaaaaranaccctgacatatgcggaatttactcagtttttatttggaaatccactggagcacgccaagcaagcctttgtgcacngggccatgctaggactgggagggtncagccatcgattccgngcatctggcacatcngccc

SEQ ID NO: 588 - DNA, 960 bp, Homo sapiens
  SITE (916): n equals a,t,g, or c
  SITE (920): n equals a,t,g, or c
  SITE (930): n equals a,t,g, or c
  SITE (933): n equals a,t,g, or c
  SITE (953): n equals a,t,g, or c
gaaaaagggtaacaacccggaaagtagactcaccgtcttggtctagagactgacccctgcacagacagaccccttcccctctctgcgaaaggaccaagccccagaagtcactccatctcctacggctcgcaatttccagaggccccctggcaccttccagcctgatgtcgtgcgtcaagttatggcccagcggtgcccccgcccccttggtgtccatcgaggaactggagaaccaggagctcgtcggcaaaggcgggttcggcacagtgttccgggcgcaacataggaagtggggctacgatgtggcggtcaagatcgtaaactcgaaggcgatatccagggaggtcaaggccatggcaagtctggataacgaattcgtgctgcgcctagaaggggttatcgagaaggtgaactgggaccaagatcccaagccggctctggtgactaaattcatggagaacggctccttgtcggggctgctgcagtcccagtgccctcggccctggccgctcctttgccgcctgctgaaagaagtggtgcttgggatgttttacctgcacgaccagaacccggtgctcctgcaccgggacctcaagccatccaacgtcctgctggacccagagctgcacgtaagctggcagattttggcctgtccacatttcagggaggctacagtcagggacagggtccggggagccagggggcaccctgggctacttggccccagaactgttkgtaacgtaaaccggaaggcctccacagccagtgacgtcttacagcttcggggatcctaatgtggggcagtgcttgctggaagagaattgagttgccaaccgaaccatcactcgtgtacgaagcatttgcaaaaggcagaaccggcttcattggctgagctgcccccaagccggggcttganaatnccggcttaanaangacttaaaggagctaatgcnagcccct

SEQ ID NO: 589 - DNA, 500 bp, Homo sapiens
gcgctgggtgcaggagaacatcgcagccttcgggggagacccaggaaatgtgaccctgttcggccagtcggcgggggccatgagcatctcaggactgatgatgtcacccctagcctcgggtctcttccatcgggccatttcccagagtggcaccgcgttrttcagacttttcatcactmgtaacccactgaaagkgccaagaaggttgcccacctggctggatgcaaccacaacagcacacagatcctggtaaactgcctgaggcactatcagggaccaaggtgatgcgtgtgtccaacaagatgagattcctccaactgaacttccagagagacccggaagagattatctggtccatgagccctgtggtggatggtgtggtgatcccagatgaccctttggtgctcctgacccaggggaaggtttcatctgtgccctaccttctaggtgtcaacaacctggaattcaattggctcttgccttatgtaagtgagtaggag

SEQ ID NO: 590 - DNA, 418 bp, Homo sapiens
caaaaagaaatttctgagtcattgagtgtcaccagagaccaggatgaagatgataaggctccagagccaacgtgggctgatgatgtgcctgccactacctcatctgaggccaccaccacyccmaggccactgctcagcacccctgtggatggggcagaggatcctagatgtttggaagccttgaagcctggaaactgtggtgaatatgtggttcgatggtattatgacaaacaggtcaactcttgtgcccgattttggttcagtggctgtaatggctcaggaaatagattcaacagtgaaaaggaatgtcaagaaacctgcattcaaggatgagcaagtaaattggcctgtctctatcaaaagcatagaactccctaatttccacatattcacccaatacaaatacagcactataaaa

SEQ ID NO: 591 - DNA, 1488 bp, Homo sapiens
  SITE (1461): n equals a,t,g, or c
  SITE (1467): n equals a,t,g, or c
  SITE (1473): n equals a,t,g, or c
  SITE (1482): n equals a,t,g, or c
cccagacagaagagaccacggtaaagatcagctgacggcctctgtgggaacaaagacagggaaaggggaaatgagttcaccagaaaccaacaggcagcacaggaggtggtaaacccgaaaaagaaaatgaagaaaaagaaatacgtgaattctggcacagtcaccctgctttcctttgctgtggagtcagagtgcaccttccttgactacatcaaaggagggacccagatcaacttcactgtggccattgatttcactgcctccaatgggaacccctcacagtccacatccctgcactacatgagcccctaccagctgaacgcctacgcgctggcgctgactgccgtcggagagatcatccagcactacgacagtgacaagatgttccctgccctgggcttcggggccaagctgcccccggatggcagagtgtcccacgagttcccactgaatggcaaccaggagaacccctcatgctgcggcatcgacggcatcctggaggcctaccaccgcagcctgcgcactgtgcagcygtacggccccaccaactttgcccccgtggtcacccacgtggccaggaatgcagcggccgtgcaggatggctcccagtactcggtgctgctcatcattactgatggggtcatctcggacatggcgcagaccaaggaggccattgtcaacgctgccaagctccccatgtccatcattatcgtcggcgtgggccaggcagagttcgacgccatggtggagytggatggcgacgamgtgcggatctcctcccgggggaagctggctgaacgcgacatcgtccagtttgtacccttccgggactacgtggaccgcacaggcaaccacgtgctgagcatggcccgcctggcccgagacgtgctggcagagatccctgaccatcaaggtggaggtgtatgactgggatcgggacggcagccatgacttcattggggagttcaccaccagttaccgggagctggcccgtgggcagagccaattcaacatctatrargtggtaaacccgaaaaagaaaatgaagaaaaagaaatacgtgaattctggcacakkcaccctgctttcctttgctgtggagtcagagtgcaccttccttgactacatcaaaggagggacccagatcaacttcactgtggccattgatttcactgcctccaatgggaacccctcacagtccacatccctgcactacatgagcccctaccagctgaacgcctacgcgctggcgctgactgccgtcggagagatcatccagcactacgacagtgacaagatgttccctgccctgggcttcggrgccaagctgccccggatggcagagtgcccacgagttcccactgaatggcaaccaggagaacccctcatgctgcggcatcgacggcatcctggaggcctacaccggagctggcactgtgcactgtcggcccaccaaaattntccccnggggancccaagggnccagaa

SEQ ID NO: 592 - DNA, 505 bp, Homo sapiens
  SITE (504): n equals a,t,g, or c
tttttttttttyggttggttacgacaaggcaaaacctttaataacatgagtgcttattacattagctgcttcggggctctgacatctttgatttctggtcatgtttttctaacacataaagrtgaatgcctccctcagggccacctgggcggtggttggtttcctgaggatttgtgtgggtagacaatggggacaactatgagcgcgcctgatggagattcggaaatcccccctggccaccacctgtgacttttagtaaagtcctcttccaaggagggaagaatgtggaggtccttccagtaaagaaggaagaaaggaaaacatctggcacagatacacagagagaggaatgacattaagggattggcttgaaaagttagagaggatggaggggttaggacttggagggtgaggggaaaatktgggakagggctgagtccatttgggttcattctttgtaaaaagtaattccatcacaaggaccatgccatgccaacctcagana

SEQ ID NO: 593 - DNA, 1493 bp, Homo sapiens
ctaagctgactcagatttttggcagaattcagttccttgtggttgcaactgaggtcccaatttttttttcctgcttgctgacaactggaaggtaggtctcatctcctagaggccacctttaggttttagccaatgtggccctctcacatacttcttcaaggcttacaaggagaattcttcttgcaagggttcacttgattaggtcaggccmtttcaacagtctcaaagtgagttgtttaggaaccttaactgcatctgccaaattccttcaactttgtcatgtaacataatctaataatggacatatcattatggcagtatcatcaagggatattttatttgtggttaaatgattgctgtgaacacaatctataaatatatgactaataggattttgtaactggctctataaactttaaattttgtatcattttacaatttacaaagtgcttgtatatattttgcatcatttgattttcatgactacctgtcagagaagcacagcagatattagcccaatgttattagtggctcacagcagctaagtgtatgtccaaagctttacagcaaattagtagtggagtcagctgggcttcagatcagagtgtttccaccctacatacagcccaggctctttttgctaaccctgtaattttcaaactgtgtttggtgatgcttgaaggagatttctcagggattactgtaagaactgggggtgatactaatgggtagggctaagtgttgatatggtggctctatttttatattttggaagttcaacccatgctttaataaccactgtcctgcaacagcctatgccttgttaaaggtaaagaagaatatttaggaaaaaaatcagttaaaaaaatggttgagataggtgtatataaaaagtcaagagtcttttccaataaagttttaagaagctgtcatctcttgcagcagctgttgaaccttcttaatgtctggtctcttatttttcttttcatgcagacattgactagcaacagagtacatagcttcaactgaagtggaatcagcatcattcatctttttatcaatataatcttcaattgtcttttcttcatcttcaatttcttctttaatatctagcaataactgaggttcacggtgttcatccacagctggaagtccagttattatttctagtaaaaccacaccaaagctgtaaatatcagatttgggtgttatttctccacgcaaagcttctggtgccatataagctgttgttcccacaattctgctagtcatgactgtctgggcaaacttctcagaagcccgtgcaaggccaaagtcagatattttagcagtaaaagcttcatccagtaagatatttgcacttttaatatctctatgaatatgatgattttcatgtagaaaattgatgccattagctgcaccctgagcaatcttgcatctcatgtgccaagaaagtggtggagtaccatccaagcaagagagtctgtctagcc

SEQ ID NO: 594 - DNA, 2522 bp, Homo sapiens
  SITE (1100): n equals a,t,g, or c
cctttttttttttttttttttttttttttttttttttttgtattttgaggatttgtttccgttttatttttcgtcaatatttttcactgcatttttcacatcaacagagttgggtttagggttccccaggagagcaagggagatggatgggtccctcccaggggtgcgaggaagagggctacgtccagcatgtggggagtgagggacaagggcacagggcacacactcatacactgggcactggagaaggcagtcttttgagcacagacaccaaagagttaaacagtcaccacctggtacagtgttacaaaatggggagagtgaccacagggttggggcactggacgcagcatgacgaaggtgaattttgattttyttttttgttattttcacttttttccttttaacatttttttaaacattttacaaacatctaaaaactacaacacgtcacagctacagtggggtgaggggagggcaccaaagaaagcagccacacagagtagggtgggatggggcagcctaacctacagaggctattgtgtggaagggtaaaatggggaaactgaggcttctagtccctgcattaggggtccctcactcactgcccaacctctccccactcagaggagctgccaggagggcccctgcttcctgcctctgccccagctctttgtgctttttgatctgctggtttgaccagatgcctggtttctttccctcccctgctcccctccctgtgaggggacaggtagggagcatgggagggcagctgtgctattcccgcctgtgctgtagtgggtggagcctctcactccagaggaggcctctgcttcttgaggagggaaggagatgggccttgtcggatgccctcagatctccctagactgtgggactcttatcccaggctggcctagggctcctccatcccaggctcaacacagaaaccagattaggggaggaactgtgggaggcagggttgtgtgtgcatccgctgaaattacccttggcttatatttgaggacagtatagtgataccccccgccccatggcacatgcacacacatatgtaagtatacatacacattcacacacagtcntgcggagctgcctcagaacttaatctattaataaataagaatcagaaagctaatttcataaaattcaggcttcatatttgcagcccaaattgagaggaaagtggaggccagagggctgaggtttattgcttctcccccagcatccaacaggagatgtgagagggcacccgaggcccactcttcagactctaagaagttcttttggtccatggtctacaccagagccccagcccctagcataattgcatacctgtggtttcaccagggcctaggcagagggaatgatggggaaggcaggaagcctattctggaacccctggaacagggaagcaagggcccctctctaacagggggagaaggatggggctcagccttctcttgtgcaaagtcaagggcagtgggaaatggggagtacagcttcatctcaaaactgggatgaaggagccttccctgtagtccctgcccacggggtttacacacatgcacacgcacacgcacacacagctaagacaccaaacacggggagtggggagtgagggctctggaggtcaggatggcagggcagggaggggaaggaaggagttgttggtctcacagtgtgcctgccaatcccaaagccctagagaccccttcactgcagcacctgcccccgggtctcaggcagcttcagggccagagagctgccaagggcaagggcagctgaggcaaagaggatgggtgcagccttggtgattcccacgaaggatgtgaagatgctgatccccagcacagctgccagcttacacagggcattcaggaagccaaaagctgtggtcctcttgtctgaggggtagagttcaacagtcaacacgtccagcgcattccaggatgcaatgctgaccccgccaaaaaggcagagcagagcgatcatggccgactcactgttcccaaaagacaggaagaagcaggagacacaggacatcacgctggagccagcaagcattctgagcctgccgatcttgtccatgagcagggcagacacgatattcccaggaagcactgccagtgtccccaggaagctcacaaagtataccatgtaggcaccttcgcccgtccctgtcacgtctagcgggcagccctccttgttgtgcaggaatgtactgtttatcagacggctgttcacaaacttgtactcgaacaggtcagtgttatagaacacagtgttgatgaatgtgcagttgcggaaaaacgtgttgctggatgtgacatcctcaaaataacactcttcaaacagggaatcctcaaaggacactgacttgagccgcagcccaatgaacttgtcattgaagtactgcccgcctcggtggatctgattctccaacgtgaagttaaaagttacatgctctacgcgctccccggggaacactttggtgcgggatgcgc

SEQ ID NO: 595 - DNA, 415 bp, Homo sapiens
  SITE (323): n equals a,t,g, or c
  SITE (393): n equals a,t,g, or c
  SITE (394): n equals a,t,g, or c
  SITE (395): n equals a,t,g, or c
ggcacgagcagacactgctccttgggtagccataactgtgtccccactttccagggtgccagacctacatggacatcgtcattgtcctggatggctccaacagcatctacccctgggtggaggttcagcacttcctcatcaacatcctgaaaaagttttacattggcccagggcagatccaggttggagttgtgcagtatggcgaagatgtggtgcatgagtttcacctcaatgactacaggtctgtaaaagatgtggtggaagctgccagccacattgagcagagaggaggaacagagacccggacggcatttggcattgantttgcacggttaaaaaaaaagtagaacaaaaaaattttttttagatctcagatgctattgttagttatcnnnttgccttttaacacattacc

SEQ ID NO: 596 - DNA, 780 bp, Homo sapiens
  SITE (728): n equals a,t,g, or c
  SITE (776): n equals a,t,g, or c
acgtcagatttgactgcattctttccactccattgatgactaacactccataagaagaccccatcctcacagaacctacttcttatagagtgtctgtggcagaagctatttttcaaagttggctgcaacaatattccccattctaaatgctcttctgcaaaatgacctcgctgttcatccatcaagggcagaaccaaattcccttccccttgaatctggcctgggctcagtcacttgcccaaccaatagaatgtggcagaagtcatattctgggacttcgagactaggttataggcagtctcccargtcctgcctgggcctcttgggatgctcactcttgggacgctgtctctaaaactcctgttgccatgccacaaggaaatcaagccacatggctacgtgtgggtgctcaggtcaccagtcccacctgagctctcagccaacagccaacaacaactgacagccacgtgagaaccttcagatgacaacagcccaaggtgacaccagactgcaactacctgagaggacccaagagaaaaccgaccagctgagcccagtcaaactccagaattttgaggaattaagaaattattgtctcaaggtactaaattttgtggtagtgtgttacaaggcaatagataactacaatagcatctgagatctaaaaaaattttttttgttctactttttttttaccgtgcaaattcaatgccaaatgccgtccgggnctctgttcctcctctctgctcaatgtggctgcagcttccaccacactnttac

SEQ ID NO: 597 - DNA, 441 bp, Homo sapiens
  SITE (430): n equals a,t,g, or c
gcggagccaagacggtcggggctgcttgctaactccaggaacaggtttaagtttttgaaactgaagtaggyctacacagtaggaactcatgtcatttcttaccaatgatgcgagctcagagtcaatagcatccttctctaaacaggaggtcatgagtagctttctgccagagggagggtgttacgagctgctcactgtgataggcaaaggatttgaggacctgatgactgtgaatctagcaaggtacaaaccaacaggagagtacgtgactgtacggaggattaacctagaagcttgttcaatgagaatggtaacattcttgcargggcgagctgcatgtctcccaaactcttcaaaccatcccaatatcgtgccatatcgagccacttttattgcagacaatgagctgtgggttgtcacatcaatcaanggaaacggttc

SEQ ID NO: 598 - DNA, 2219 bp, Homo sapiens
  SITE (10): n equals a,t,g, or c
  SITE (572): n equals a,t,g, or c
aagcaatacnaagatgccatccgagcccacaaggctggccgagccgtggatgtcgctgaattgcccgtgccacccaggyttccccccaatccagggcctggrggccaccaagcccacccagcagagtctggtgggtgtcctggagactgccatgaagctggccaaccaggatgaaggcccagaggatgaagaggwtgaggtgcctaagaagcagaacagccctgtggcccccacagcccagcccaaagccccaccctcaagaactccccagtcgggatcagccccaacagccaaaggcgccccccaaagccacatccaccagagcccagcagcagctggccttcctagagggccgcaagaagcagctcctgcaggccgcactgcgagccaagcagaaaaacgacgtggagggtgccaagatgcacctgcgccaagccaagggactggagcctatgctggaggcctcgcgcaatgggctgctgtggacatcaccaaggtgccgctgccctgtcaacaaggacgactttgcctggtccagcggcctggcccgggtctgtctcaggaggccgccnggcgctatggtgaactcaccaagttcatacggcagcagcacgagatgtgcctgaaccactcaaaccaattcacccagctgggcaacatcactgaaaccaccaagtttgaaaagttggcggaggactgtaagcgggcatggacattctgaagcaagccttcgtccggggtctccccacgcccaccgcccgctttgagcaaaggaccttcagcgtcatcaagatcttccctgacctcagcagcaacgacatgctcctcttcatcgtgaagggcatcaacttgcccacacccccaggactgtcccctggcgatctggatgtctttgttcggtttgacttcccctatcccaacgtggaagaagctcagaaagacaagaccagtgtgatcaagaacacagactcccctgagttcaaggagcagttcaaactctgcatcaaccgcagccaccgtggcttccgaagggccatccagaccaagggcatcaagttcgaagtggttcacaagggggggctgttcaagactgaccgggtgctggggacagcccagctgaagctggatgcactggagatagcatgtgaggtccgggagatccttgaggtcctggatggtcgccggcccacaggggggcgactggaggtaatggtccggattcgggagccactgacagcccagcagttggagaygacgacagagaggtggctggtcattgaccctgtgccggcagctgtgcccacacaggttgctgggcccaaagggaaggcccctcctgtgcctgcccctgcaagggagtcagggaacagatcagcccggcccctgcatagcctcagtgtgctggcgtttgaccaagagcgtctggagcggaagatcctggccctcaggcaggcgcggcggccggtgcccccagaagtggcccagcagtaccaggacatcatgcaacgcagccagtggcagagggcacagctggagcaggggggtgtgggcatccgacgggaatacgcagcccagctggagcggcagctgcagttctacacggaggctgcccggcgcctgggcaacgatggcagcagggatgctgcaaaggaggcgctctataggcggaatctggtagagagtgagctgcagcggctccgcaggtgaggagcccatggggcgggcagccccagaaagcgggcagcaggccccgataccgggaagagccgacacagccacgaaccagacaagcagacaatcagcggacaatcggttctggactcacccctcatccgggcccccagccccgccagagcctccgtggctgcgggtgttgggaaccatgcctgccagccagtatgtgcccctcacccaggcctggctgggccctggagagtcctgtttgcacagcccaggggtgtccggcctctggcccgccccggagcagggagggtggctggggccaagccccgagggcccctgcaagcactttacttcctgttcctccccagccttaaccccaaagccctcctgcaccccaaagaagccactgaggctggccgagccacactgtctccccaggggcgtcgacctggcccagctgggtccccagggccagcacatggaataaaatagccagggccacactcaaaaaaaaaaaaaaaaaaaaaaaaaaaaaa

SEQ ID NO: 599 - DNA, 2991 bp, Homo sapiens
  SITE (2986): n equals a,t,g, or c
gagaagggccgagcacagcatggcggtcaaggtgcagacaactaagcgaggggatcctcatgagttaagaaacatatttctacagtatgccagtactgaggttgatggagagcgttayatgaccccagaagactttgttcagcgctatcttggactgtataatgatccaaatagtaacccaaagatcgtgcagctcttggcaggagtagctgatcaaaccaaggatgggttgatctcctatcaagagtttttggcatttgaatctgttttatgtgctccagattccatgttcatagtggctttccagttgtttgacaagagtggaaatggagaggtgacatttgaaaatgtcaaagaaatttttggacagactattattcatcatcatatcccttttaactgggattgtgaatttatccgactgcattttgggcataaccggaagaagcatcttaactacacagaattcacgcagtttctccaggagctgcaattggaacatgcaagacaagcctttgcactcaaagacaaaagcaaaagtggcatgatttctggtctggatttcagygacatcatggttaccattagatctcacatgcttactccttttgtggaggagaacttagtttcagcagctggaggaagtatctcacaccaggttagcttctcctacttcaatgcatttaactcgttactgaataacatggagcttgttcgtaagatatatagcactctagctggcacaaggaaagatgttgaagtcacaaaggaggaatttgcccagagtgccatacgctatggacaagtcacaccactagaaattgatattctatatcagcttgcagacttatataatgcttcagggcgcttgactttggcagatattgagagaatagccccattggctgagggggccttaccttacaacctggcagaacttcagagacagcagtctcctgggttaggcaggcctatctggctccagattgccgagtctgcttacagattcactctgggctcagttgctggagctgtgggagccactgcagtgtatcctatagatctggtgaagacccgaatgcaaaaccagcgtggctctggctctgttgttggggagctaatgtacaaaaacagctttgactgttttaagaaagtcttgcgttatgagggcttctttggactctacaggggtctgataccacaacttataggggttgctccagaaaaggccattaaactgactgttaatgattttgttcgggacaaatttaccagaagagatggctctgttccacttccagcagaagttcttgctggaggctgtgctggaggctctcaggtcatttttaccaacccattggagatagtgaagattcgtctgcaagtagctggagagatcaccacgggacccagagtcagcgccctgaatgtgctccgggacttgggaatttttggtctgtataagggtgccaaagcgtgtttcctccgagacattcccttctctgcaatctattttcctgtttatgctcattgcaaactacttctggctgatgaaaatggacacgtgggaggtttaaatcttcttgcagctggagccatggcaggtgtcccagctgcatctctggtgacccctgctgatgtcatcaagacaagactgcaggtggctgcccgcgctggccagacgacatacagtggtgtcatcgactgtttcaggaagattctccgggaagaagggccctcagcattttggaaagggactgcagctcgagtgtttcgatcctctccccagtttggtgttaccttggtcacttatgaacttctccagcggtggttttacattgattttggaggcctcaaacccgctggttcagaaccaacacctaagtcacgcattgcagaccttcctcctgccaaccctgatcacatcggtggatacagactcgccacagccacgtttgcaggcatcgaaaacaaatttggcctttatctcccgaaatttaagtctcctagtgttgctgtggttcagccaaaggcagcagtggcagccactcagtgatgagacaactgttgagtgtggcaaaatggcgccttgaagaaagaggcctaggagagcagccctgtaatgtatccagtcagctgcatggtactgactgagctgaggagtcaaactcttctttctgtatgacatatacatatacttgtttataaaataatcatttgcccagggaaaaaaccacaacgctgtttcaagctttagtcttatgtgttgaaatgtttttgtaagccttggcatgaattagtgttctagactctgctttgcacagcttgcacttacagtgattgtacatattgtacatctttgtacagagacatcttggcacctcatcccaacaaatcacatttgtagaaatgtaatgcggttctgagtggcttgaaatgtacagaatgttttgaaagtgttttattaagaatcacacaaaaataaatgtattaaaattaaattcattctcttattggtgacttatggaaataaagcatcaatattggatgtatttaattcctagtttgttttccattctggaataaaaaggtatttgctgataaaaggcataacgagacatagtgctgctaccactgaataagtgatactttggaaagatgcatgccagtggatgccagaggaccaggctaatgacttgtgtgtgctgatgtgtttccatttgtatttaatgtgtgtagaccctcctctgttcatcaatcaaaaagcatttcctaggcagctcctcgcctgtcastgtgcatatggaaacagggacatctccatcattactggcttagttttgctttcctttgacacagtaaggcaaaggccaagctttcaaaagagtaaaggatactttcacaatttcccttcatatggatatgattccagtcaaaaataaaatgcacaccaaaatgtaaaaaaawaaaaaaaaaaaaaaaaaanggggg

SEQ ID NO: 600 - DNA, 703 bp, Homo sapiens
  SITE (680): n equals a,t,g, or c
  SITE (694): n equals a,t,g, or c
gcggacgcgtgggcttgggtgaccctggccgccaccaagctgttctcctctatacacctgcctggcttgaggtccctgaagcagctgagccggcttcccactgcctcagcctgcctgcaggctgtgtctgctctgtcctcggccctcgtggttgctccttacagggcctgtttttcccacaggctggtttccagccaagttcgtggaagtcctggatgagcgcagcaaagagtactccatcgcgggggatgactcggtgacggagggggtcacagacctcgtgcgagggaccctctgcccggcccttaaggccctgttcgaacatggactgaagaagccatccctgcttgggggcgcctgccacccctggctgtttatcgaggaggctgcaggccgggaggtcgagagagactttgcctccgtgtattcccgtctggtgctctgtaagaccttcaggttggatgaagatggcaaagtcctgaccccggaggagctgctctaccgggctgtgcagtctgtgaacgtgacccacgatgcagtgcatgcacaaatggatgtgaagctccgctcactgatctgcgtggggctcaagtgagtktggaaaaggggttggaggaragccytggartkgggggacccarcccarcatcagggggggtccttacagggacccttaaggnccaaagaaccttangggctaagg

SEQ ID NO: 601 - DNA, 1904 bp, Homo sapiens
cattagacagcacactgctgactgttttcagttgtttctgtaacagcagaaagtgcactcactaggagtagtcagaattcaaaatgctcaagagaaagccatccaatgtttcagagaaggagaaacatcaaaaaccaaagcgaagcagcagttttgggaatttcgatcgttttcggaataattctttatcaaaaccagatgattcaactgaggcacatgaaggagatcccacaaatggaagtggagaacaaagtaaaacttcaaataatggaggcggtttgggtaaaaaaatgagagctatttcatggacaatgaagaaaaaagtgggtaaaaagtacatcaaagccctttctgaggaaaaggatgaggaagatggagagaatgcccacccatatagaaacagtgaccctgtgattgggacccacacagagaaggtgtccctcaaagccagtgactccatggatagtctctacagtggacagagctcatcaagtggcataacaagctgttcagatggtacaagtaaccgggacagctttcgactggatgacgatggcccctattcaggaccattctgtggccgtgccagagtgcatacggatttcacgccaagtccctatgacactgactccctcaaaatcaagaaaggagacatcatagacattatttgcaaaacaccaatggggatgtggacaggaatgttgaacaataaagtgggaaacttcaaattcatttatgtggatgtcatctcagaagaggaagcagcccccaagaaaataaaggcaaaccgaaggagtaacagcaaaaaatccaagactctgcaggagttcctagagaggattcatctgcaggaatacacctcaacacttttgctcaatggttatgagactctagaagatttaaaagatataaaagagagtcacctcattgaattaaatattgaaaacccagatgacagaagaaggttactatcagctgctgaaaacttccttgaagaagaaattattcaagagcaagaaaatgaacctgagcccctatccttgagctcagacatctccttaaataagtcacagttagatgactgcccaagggactctggttgctatatctcatcaggaaattcagataatggcaaagaggatctggagtctgaaaatctgtctgacatggtacataagattattatcacagagccaagtgactgaacacgcattcccaactatatatctacagatgcattccattttaactcttcttgagctaaaacgtcaaataggagaggaagataagataaatatttgtaaataaaacctaaagtttaaatgttttaatctgaataattgtacataaaattttgtatctctaacattccaaattactgtcaataaaatatatatttattattttaaatgctatgtgttaatatttcacttgcttgtattagaaaggcaaaatgtaagactttggtatgtgtgacatatgctttatttggctttattttacaagtacagtatctgcaaaaaacaaagtaaccttttttcatacctgccagttttgaatttatatatgttattgaacaaatagtaatagaggattcgctgttgaaacaagttgtccaagcaatgttatattcatttttatacttattgggaaagtgtgagttaatattggacacattttatcctgatccacagtggagttttagtaattatattttgttgatttcttcattttgttttctggtataaaagtagagataatgtgtagtcacttctgatttagtgaaaccaattgtaataattgtggaaatgttttgtctttaagtgtaaatattttaaaatttgacataccctaatgttaataataaaaagaactatttgcatagcaaaaaaaaaaaaaaaaaa

SEQ ID NO: 602 - DNA, 2015 bp, Homo sapiens; identical to SEQ ID NO: 327
  SITE (3): n equals a,t,g, or c
  SITE (2006): n equals a,t,g, or c

SEQ ID NO: 603 - DNA, 1239 bp, Homo sapiens
  SITE (1196): n equals a,t,g, or c
  SITE (1214): n equals a,t,g, or c
  SITE (1228): n equals a,t,g, or c
gggctcaggatgagtgtggatggcatgaactcacactagcactggctccacctgtgctccttcggaaggagccctcagccctgagccccaaggctccagtgccctccccttgcggggcgggggcctcacaccctctgccgccctgtgctgagggccctgtggcctcccctttcttgcagtgtgagcagctacgagaagacccagagctatcccaccgactggtcagacgatgagtctaacaaccccttctcctccacggatgccaatggggactcgaatccattcgacgacgacgccacctcggggacggaagtgcgagtccgggccctgtatgactatgaggggcaggagcatgatgagctgagcttcaaggctggggatgagctgaccaagatggaggacgaggatgagcagggctggtgcaagggacgcttggacaacgggcaagttggcctatacccggcaaattatgtggaggcgatccagtgatgagtcggggacaggccagcggggggacggaggcggcgggcccaggagcctcagccagccacgtgggcatccactccttttcctgcaagagatgatggttccattgctcttggcttcatggtgttcctggaaggcagatgagctggtcatttcgcctgggactcggcacctttccgagtgcagctggagggatctgagcgcaggaagacgcagaacaacagaaatagccgcccctccccgcccactgtgcctgttggcctatcatagatctctatgttcttgactttgtctctcctttccgagtcaatggtgggttacactgatcttgttccactgattactctctctgacgagtccatcacctgcaacttaaatgaacaagcttacatcccattttgagtgaagattttgaggtttttaatttaaaggctgtgtacagttatacttttttatacacctgttcatttctacttaaattatggcacagattgatgcgcaccagtcttgaggaaacgatctccctattcccttaccctgttactcagccacgccgtgtgtaggcttagcctcaggtggcagatgtttgagraaaggaattatgccaggaaggtgggaccgggttatggtcgggtttctattggggaatgctctttgtgcttttgggcatctgaatggaactttacataggaaccttagggtaggaactnccccccaaattcgccatnattttaaaaaattnattttttcact

SEQ ID NO: 604 - DNA, 497 bp, Homo sapiens
caccatgaggacctgcgactctcccagaaggcggaggaggtgtatgcccagctgcaaaaaatgcttctggagcaacaagagaagtgcctgctgtctccaagcagtcatgcaccagggcaacgtggctgagaccacccgatttgagaagcttgctcaggaccgcaagaaacagctggagatcctgcagctggcccaggctcagggcctcsaccctcccacccaccactttgagttgaagacattccagactgtgaggatcttctcagaactcaacagcacagaaatgcatctgatcattgtccggggaatgaacctcccagcccctccaggggtgactcccgatgacctggatgcttttgtgcggtttgagtttcactaccctaactcggaccaggctcaaaaaagcaaaacagctgtggtgaagaacacaaactctccagaatttgatcaactcttcaaactaaacatcaaccgaaaccaccggggcttcaagaggg

SEQ ID NO: 605 - DNA, 1232 bp, Homo sapiens
  SITE (1186): n equals a,t,g, or c
  SITE (1204): n equals a,t,g, or c
  SITE (1206): n equals a,t,g, or c
  SITE (1227): n equals a,t,g, or c
gcggacgcgtgggtggagagtggagggacctggtgaatcatccaagattaaatacgggcaggcactgccaggcttgtgtggagatgaggctgggacactgttcgcaggaagagtccggtgttctggccccctgatgtcaccttcacgggcctgactcacagtcctaaatatctgacagcgagatcgcttttcgtgccctcgtgaggctggcatgcaggatggcaggacagcccggccacatgccccatggagggagttccaacaacctctgccacaccctggggcctgtgcatcctcctgacccacagaggcatcccaacacgctgtcttttcgctgctcgctggcggacttccagatcgaaaagaagataggccgaggacagttcagcgaggtgtacaaggccacctgcctgctggacaggaagacagtggctctgaagaaggtgcagatctttgagatgatggacgccaaggcgaggcaggactgtgtcaaggagatcggcctcttgaagcaactgaaccacccaaatatcatcaagtatttggactcgtttatcgaagacaacgagctgaamattgkgctggagttggctgacgcargggacctctcgcagatgatcaagtactttaagaagcagaagcggsttmatcccggaraggacagtatggaagtactttgtgcagctgtgcagcgccgtggagcacatgcattcacgccgggtgatgcaccgagacatcaagcctgccaacgtgttcatcacagccacgggcttcgtgaagctcggtgaccttggtctgggccgcttcttcagctctgagaccaccgcagcccactccctagtkgggacgccctactacatgtcaccggagaggatccatsagaacggctacaacttcaagtccgacatctggtccttgggctgtctgctgtacgagatggcagccctccagagccccttctatggagataagatgaatctcttctccctgtgccagaagatcgagcagtgtgactaccccccactccccggggagcactactccgagaagttacgagaactggtcagcatgtgcatctgccctgacccccaccagagacctgacatcggatacgtgcaccaggtggccaagcagatgcacatctggatgtccagcactgagcgtggatgaccgtgcttatcaaagncacacattttgcttattngntcgttttttttgggtggcacnggtag

SEQ ID NO: 606 - DNA, 542 bp, Homo sapiens
  SITE (507): n equals a,t,g, or c
  SITE (508): n equals a,t,g, or c
ggtgtttcctgccctatcacacactgaggaccgtccacttgacgacatggaaagtgggtttatgcaaagacagactgcataaagctttggttatcacactggccttggcagcagccaatgcctgcttcaatcctctgctctattactttgctggggagaattttaaggacagactaaagtctgcactcagaaaaggccatccacagaaggcaaagacaaagtgtgttttccctgttagtgtgtggttgagaaaggaaacaagagtataaggagctcttagatgagacctgttcttgtatccttgtgtccatcttcattcactcatagtctccaaatgactttgtatttacatcactcccaacaaatgttgattcttaatattwagttgaccattacttttggtaataagacctacttcaaaatttattcaggggatttcagttgtgagtcttaatgagggattcaggaggaaaaatcctactagagtcctgtgggctgaaatatcannactggggaaaaaatgcaaagcacattgggatcct

SEQ ID NO: 607 - DNA, 1735 bp, Homo sapiens
agggcgcgccctgacggactggccgagccggcggtgagaggccgcgcgtcgggagcgggccgcgcggcaccatgtcggccaaggtgcggctcaagaagctggagcagctgctcctggacgggccctggcgcaacgagagcgccytgagcgtggaaacgctgctcgacgtgctcgtctgcctgtacaccgagtgcagccactcggccctgcgccgcgacaagtacgtggccgagttcctcgagtgggctaaaccatttacacagctggtgaaagaaatgcagcttcatcgagaagactttgaaataattaaagtaattggaagaggtgcttttggtgaggttgctgttgtcaaaatgaagaatactgaacgaatttatgcaatgaaaatcctcaacaagtgggagatgctgaaaagagcagagaccgcgtgcttccgagaggagcgcgatgtgctggtgaacggcgactgccagtggatcaccgcgctgcactacgcctttcaggacgagaaccacctgtacttagtcatggattactatgtgggtggtgatttactgaccctgctcascaaatttgaagacaagcttccggaagatatggcgaggttctacattggtgaaatggtgctggccattgactccatccatcagcttcattacgkgcacagrgacattaaacctgacaatgtccttttggacgtgaatggtcatatccscctggctgactttggatcatgtttgaagatgaatgatgatggcactgtgcagtcctccgtgsccgtgggcacacctgactacatctcgccggagatcctgcagscgatggaggacggcatggscaaatacgggcctgagtgtgactggtggtctctgggtgtctgcatgtatgagatgctctatggagaaacgccgttttatgcggagtcactcgtggagacctatgggaagatcatgaaccatgaagagcgattccagttcccatcccatgtcacggatgtatctgaagaagcgaaggacctcatccagagactgatctgcagtagagaacgccggctggggcagaatggaatagaggatttcaaaaagcatgcgttttttgaaggtctaaattgggaaaatatacgaaacctagaagcaccttatattcctgatgtgagcagtccctctgacacatccaacttcgacgtggatgacgacgtgctgagaaacacggaaatattacctcctggttctcacacaggcttttctggattacatttgccattcattggttttacattcacaacggaaagctgtttttctgatcgaggctctctgaagagcataatgcagtccaacacattaaccaaagatgaggatgtgcagcgggacctggagcacagcctgcagatggaagcttacgagaggaggattcggaggctggaacaggagaagctggagctgagcaggaagctgcaagagtccacccagaccgtgcagtccctycacggctcatctcgggccctcagcaattcaaaccgagataaagaaatcaaaaagctaaatgaagaaatcgaacgcttgaagaataaaatagcagattcaaacaggctggagcgacagcttgaggacacagtggcgcttcgccaagagcgtgaggactccacgcagcggctgcgggggctggagaaacagcaccgcgtggtccggcaggagaaggaggagctgcacaagcaactggttgaagcctcagagcg

SEQ ID NO: 608 - DNA, 1857 bp, Homo sapiens; identical to SEQ ID NO: 334

SEQ ID NO: 609 - protein, 140 aa, Homo sapiens
  SITE (4): Xaa equals any of the naturally occurring L-amino acids
  SITE (9): Xaa equals any of the naturally occurring L-amino acids
  SITE (21): Xaa equals any of the naturally occurring L-amino acids
  SITE (41): Xaa equals any of the naturally occurring L-amino acids
  SITE (55): Xaa equals any of the naturally occurring L-amino acids
  SITE (63): Xaa equals any of the naturally occurring L-amino acids
  SITE (77): Xaa equals any of the naturally occurring L-amino acids
  SITE (133): Xaa equals any of the naturally occurring L-amino acids
SWTXFFGWXYGTGGQISEDGXQVTVPSWMKSVCNFPADPLXPGPLPDAGFVPPSXSIPTSWGXPGCRLSATFLQHPXASWGPGHSRSVQPSSAGKPVVPWSTPGRTNADEFLNSRMSVCLCVFDNGPSFNSMXKYLFYFL

SEQ ID NO: 610 - protein, 134 aa, Homo sapiens
  SITE (3): Xaa equals any of the naturally occurring L-amino acids
  SITE (107): Xaa equals any of the naturally occurring L-amino acids
GSXPHGTQPRKVQCGKAQGWGLRGSWGQGREVLHRGWCLNSVEWSRTPENRRSTVGLKELTPWESLHPRRHFTLVPFGLCWVFKSLNHCQCLKLQRFHRKIQNPSFXNQQNKTKTQTNQELCVLLGGTLHKVPL

SEQ ID NO: 611 - protein, 51 aa, Homo sapiens
  SITE (14): Xaa equals any of the naturally occurring L-amino acids
  SITE (30): Xaa equals any of the naturally occurring L-amino acids
  SITE (47): Xaa equals any of the naturally occurring L-amino acids
MIKKTIIFLAYLNXLSCGFPCLVALYSYSXIIADTLLVRVGGKSSLXNSLF

SEQ ID NO: 612 - protein, 136 aa, Homo sapiens
  SITE (123): Xaa equals any of the naturally occurring L-amino acids
VKPDENSKAFYVPAQYVKEVTRKALMPPVKQVAGLPNNSTKIMQSLHLQRSTENVNKLPELSSFGKPSSSVQGTGLIRDANQNFGPSYNQGQTVNLSLDLTHNNGKFNNDSHSPKVSSQNRTXFIWSFSRSRVLGM

SEQ ID NO: 613 - protein, 323 aa, Homo sapiens
  SITE (84): Xaa equals any of the naturally occurring L-amino acids
  SITE (163): Xaa equals any of the naturally occurring L-amino acids
  SITE (174): Xaa equals any of the naturally occurring L-amino acids
  SITE (190): Xaa equals any of the naturally occurring L-amino acids
KGPGSLPWMNVVPASAGGCLSPKGTVQAWGVFLALPPRPSSSPEMRGKRRRKWWLRTGGGKPRAYCRLSLNDSEVDMFGDYDSXTENSFIAQVDDLEQKYMQLPEHKKHATDFATENLCSESIKNKLSITTIGNLTELQTDKHTENQSGYEGVTIEPGADLLXDVPSSQAIYFXNLQNSSNDLGDHSMKXRDWKSSSHNTVNEELPHNCIEQPQQNDESSSKVRTSSDMNRRKSIKDHLKNAMTGNAKAQTPIFSRSKQLKDTLLSEEINVAKKTVESSSNDLGPFYSLPSKVRDLYAQFKGIEKLYGNAFCWNKKIFFLSLP

SEQ ID NO: 614 - protein, 336 aa, Homo sapiens
  SITE (44): Xaa equals any of the naturally occurring L-amino acids
  SITE (211): Xaa equals any of the naturally occurring L-amino acids
  SITE (220): Xaa equals any of the naturally occurring L-amino acids
MQIAQRSMVYLTIKPLNLSQVEGKPSPWLSVDTALYILKENESXANLQLVCFTELRNREVFGWTGELGPGIYWLIPSTTGCRLRKKIKPVTDEAQLVYRDETGELFLTKEFKSTLSDIFEVIDLDGNGLLSLEEYNFFELRTSGEKCDEDAWAVCRENFDTKRNELTRQGFMDLNLMEANDREGDPCDLWVTLHSMGYNKALELTEACPFXIDIYAEKCXPKIKAVHMEACSGQLEKAICKSVLSNGDAKVMDGYENIIVHTYSCDTWITSVIENKSDEKVIIHISNELSKNCINNRGLNIFAVEVGPKSTMVCQHVMPLNERQEWIYYCIYSLIS

SEQ ID NO: 615 - protein, 309 aa, Homo sapiens
PVFNLLEVPVINPHVNSSVTRDILCLDQKDWIVLDRDAGQTPHQCVKPSSAQNSLPQSRAAWIVLTLVENSMLAPPAISLVTTALSWRGPIMWNAQLLEDGQLLHQPAKGIASLPTPGVQCPALTTPGQGTMYCRHHPGTFGFNTTCYFGCNAGFTLIGDSTLSCRPSGQWTAVTPACRAVKCSELHVNKPIAMNCSNLWGNFSYGSICSFHCLEGQLLNGSAQTACQENGHWSTTVPTCQAGPLTIQEALTYFGGAVASTIGLIMGGTLLALLRKRFRQKDDGKCPLNPHSHLGTYGVFTNAAFDPSP

SEQ ID NO: 616 - protein, 249 aa, Homo sapiens
PRVRIDIVAIIPYFITLGTELAERQGNGQQAMSLAILRVIRLVRVFRIFKLSRHSKGLQILGQTLKASMRELGLLIFFLFIGVILFSSAVYFAEADDPTSGFSSIPDAFWWAVVTMTTVGYGDMHPVTIGGKIVGSLCAIAGVLTIALPVPVIVSNFNYFYHRETEGEEQSQYMHVGSCQHLSSSAEELRKARSNSTLSKSEYMVIEEGGMNHSAFPQTPFKTGNSTATCTTNNNPNSCVNIKKIFTDV

SEQ ID NO: 617 - protein, 268 aa, Homo sapiens
GTLVSESAQLEILSLKEVGDIKASTEMRLRRFQSVESGANNVVFIRTLGIEPEKLVHHILQDMYKTKKKKTRVILRMLPISGTCKAFLEDMKKYAETFLEPWFKAPNKGTFQIVYKSRNNSHVNREEVIRELAGIVCTLNSENKVDLTNPQYTVVVEIIKAVCCLSVVKDYMLFRKYNLQEVVKSPKDPSQLNSKQGNGKEAKLESADKSDQNNTAEGKNNQQVPENTEELGQTKPTSNPQVVNEGGAKPELASQATEGSKSNENDFS

SEQ ID NO: 618 - protein, 66 aa, Homo sapiens
  SITE (8): Xaa equals any of the naturally occurring L-amino acids
  SITE (59): Xaa equals any of the naturally occurring L-amino acids
  SITE (62): Xaa equals any of the naturally occurring L-amino acids
  SITE (66): Xaa equals any of the naturally occurring L-amino acids
SDLTLCLXSYLSFWCRGSGVTIKSDFYPNRKYIGPAQCLMPVFPALWEAKTGGSRGQEXKTXWQTX

SEQ ID NO: 619 - protein, 113 aa, Homo sapiens
  SITE (12): Xaa equals any of the naturally occurring L-amino acids
  SITE (19): Xaa equals any of the naturally occurring L-amino acids
  SITE (29): Xaa equals any of the naturally occurring L-amino acids
  SITE (69): Xaa equals any of the naturally occurring L-amino acids
  SITE (70): Xaa equals any of the naturally occurring L-amino acids
IFPIRKGIPWVXHVHGQMXGRDYSSFNEXVQEGNGFVLVLNGVVHKSIPTRKFHLSKVLCLGHGCQSGXXKATTDGNITMGQAVSQGFCIHHLQLFLSGRQFLPQAYCSPRAE

SEQ ID NO: 620 - protein, 89 aa, Homo sapiens
QKQNICNFPIILVIIGFCPHTSSTGFSLYFALGFIPSYKITSFFKMVTSFSRVKRVSEPFPYSWMFSLFPYFSSVYITNNTPNDRQEKK

SEQ ID NO: 621 - protein, 305 aa, Homo sapiens
  SITE (29): Xaa equals any of the naturally occurring L-amino acids
  SITE (157): Xaa equals any of the naturally occurring L-amino acids
  SITE (205): Xaa equals any of the naturally occurring L-amino acids
  SITE (275): Xaa equals any of the naturally occurring L-amino acids
  SITE (290): Xaa equals any of the naturally occurring L-amino acids
  SITE (293): Xaa equals any of the naturally occurring L-amino acids
AISPGFPFCPLLLTPVAWGLVGAIAYAGXLGTIELKLDLVLLGAVAAVSSFLPFLWKAWAGWGSKRPLATLFPIPGPVLLLLLFRLAVFFSDSFVVAEARATPFLLGSFILLLVVQLHWEGQLLPPKLLTMPRLGTSATTNPPRHNGAYALRLGIGXLLCTRLAGLFHRCPEETPVCHSSPWLSPLASMVGGRAKNLWYGACVAXLVALLAAVRLWLRRYGNLKSPEPPMLFVRWGLPLMALGTAAYWALASGADEAPPRLRVLVSGASMVLPRXVAGLAASRLALVLWXPGXSAGESLSKRFKD

SEQ ID NO: 622 - protein, 59 aa, Homo sapiens
QPGWHNLVQDLGKSYFECKTGYRWYHSSVLREDPRKVGPKFSSRGQTKIQPGAYAGPAA

SEQ ID NO: 623 - protein, 509 aa, Homo sapiens
  SITE (491): Xaa equals any of the naturally occurring L-amino acids
  SITE (493): Xaa equals any of the naturally occurring L-amino acids
RYSGDTIEGTPAGTGPEFAAASTNFSPRAVRPGAPAPESPLRLLKLAFYQLRTMLRVIVESASNIPKTKFGKPDPIVSVIFKDEKKKTKKVDNELNPVWNEILEFDLRGIPLDFSSSLGIIVKDFETIGQNKLIGTATVALKDLTGDQSRSLPYKLISLLNEKGQDTGATIDLVIGYDPPSAPHPNDLSGPSVPGMGGDGEEDEGDEDRLDNAVRGPGPKGPVGTVSEAQLARRLTKVKNSRRMLSNKPQDFQIRVRVIEGRQLSGNNIRPVVKVHVCGQTHRTRIKRGNNPFFDELFFYNVNMTPSELMDEIISIRVYNSHSLRADCLMGEFKIDVGFVYDEPGHAVMRKWLLLNDPEDTSSGSKGYMKVSMFVLGTGDEPPPERRDRDNDSDDVESNLLLPAGIALRWVTFLLKIYRAEDIPQMDDAFSQTVKEIFGGNADKKNLVDPFVEVSFAGKKVCTNIIEKNANPEWNQVVNLQIKFPSVCEKXKXNQVYDWDRLTKNDVVG

SEQ ID NO: 624 - protein, 57 aa, Homo sapiens
HLHSSPLASLKRNTFPPFWNEETIYNFICTFIHNTLFFPFDPLINLVGSLLLFLLCS

SEQ ID NO: 625 - protein, 189 aa, Homo sapiens
TMATDELATKLSRRLQMEGEPQSPSRRVFNPYTEFKEFSRKQIKDMEKMFKQYDAGRDGFIDLMELKLMMEKLGAPQTHLGLKNMIKEVDEDFDSKLSFREFLLIFRKAAAGELQEDSGLCVLARLSEIDVSSEGVKGAKSFFEAKVQAINVSSRFEEEIKAEQEERKKQAEEMKQRKAAFKELQSTFK

SEQ ID NO: 626 - protein, 127 aa, Homo sapiens
EHTSKLFHPNATIFRGILGSHKLLFHLVQICFHDRVISTQFHQHVEKESIEFLLFYVTFFIRIKALPDLPEASGVQAPQSRFPGAVHGVDDEDQAPARKDLDNFGKDSFTVFLDLLSCFFRYLISFE

SEQ ID NO: 627 - protein, 91 aa, Homo sapiens
ITKHNSCFVLLSSMRYFDRAALFVEACLKYGAFEVTEDTEKLITAIYADYARSLKNLGFKQGAVLFASKAGAAGKDLLNELESPKEEPIEE

SEQ ID NO: 628 - protein, 228 aa, Homo sapiens
  SITE (53): Xaa equals any of the naturally occurring L-amino acids
  SITE (82): Xaa equals any of the naturally occurring L-amino acids
  SITE (156): Xaa equals any of the naturally occurring L-amino acids
  SITE (228): Xaa equals any of the naturally occurring L-amino acids
GSLRFPFRAGRRRTPVSLSLFCTVSFCSSPGLAWQRGRVGRPCGSAPQLLYLXMVVCKGFVEDLDESFKENRNDDIWLVDFXAPWCGHCKKLEPIWNEVGLEMKSIGSPVKVGKMDATSYSSIASEFGVRGYPTIKLLKGDLAYNYRGPRTKDDIXEFAHRVSGALIRPLPSQQMFEHMQKRHRVFFVYVGGESPLKEKYIDAASELIVYTYFFSASEEVVPEVIFKX

SEQ ID NO: 629 - protein, 60 aa, Homo sapiens
  SITE (13): Xaa equals any of the naturally occurring L-amino acids
  SITE (14): Xaa equals any of the naturally occurring L-amino acids
  SITE (52): Xaa equals any of the naturally occurring L-amino acids
  SITE (55): Xaa equals any of the naturally occurring L-amino acids
  SITE (58): Xaa equals any of the naturally occurring L-amino acids
  SITE (59): Xaa equals any of the naturally occurring L-amino acids
MKTQNTSSIKHLXXLGAWAHGCNSQHFWGGQVGRVPQGSRGWGGPSWANLGXTPXFFXXI

SEQ ID NO: 630 - protein, 102 aa, Homo sapiens
PFVAGFAVITAAQDVWMLLGGRLLTGLACGVASLVAPVSVPSLECPVSRPETEGEWDKPLPRPGGAAPPGGTFWVPGLKSLRYLAVPPVDPGKDPTVLSILH

SEQ ID NO: 631 - protein, 202 aa, Homo sapiens
VDPRVRFAIKLQNLQTVRLVFKIQTQTPRKKTIGECSMSLRTLSTQEMDYSLDITPPSKISVCHAELELGTCFQAVNSRIQLQILEARYLPSSSTPLTLSFFVKVGMFSSGELIYKKKTRLLKASNGRVKWGETMIFPLIQSEKEIVFLIKLYSRSSVRRKHFVGQIWISEDSNNIEAVNQWKETVINPEKVVIRWHKLNPS

SEQ ID NO: 632 - protein, 323 aa, Homo sapiens
  SITE (221): Xaa equals any of the naturally occurring L-amino acids
  SITE (235): Xaa equals any of the naturally occurring L-amino acids
  SITE (263): Xaa equals any of the naturally occurring L-amino acids
  SITE (277): Xaa equals any of the naturally occurring L-amino acids
  SITE (281): Xaa equals any of the naturally occurring L-amino acids
FLQRIKHPNSIEYKGCYLREHTAWLVMEYCLGSASDLLEVHKKPLQEVEIAAITHGALQGLAYLHSHTMIHRDIKAGNILLTEPGQVKLADFGSASMASPANSFVGTPYWMAPEVILAMDEGQYDGKVDVWSLGITCIELAERKPPLFNMNAMSALYHIAQNESPTLQSNEWSDYFRNFVDSCLQKIPQDRPTSEELLKHIFVLRERPETVLIDLIQRTKXAVRELDNLQYRKMXKLLFQEAHNGPAVEAQEEEEEQDHGVGXTGTVNSVGSNQSIXSMSXSASSQSSSVNSLPDVSDDKSELDMMEGAHPVMCGSSVIHFKP

SEQ ID NO: 633 - protein, 820 aa, Homo sapiens
PRVRDPGVWLPPSRDPAMAKRSSLYIRIVEGKNLPAKDITGSSDPYCIVKVDNEPIIRTATVWKTLCPFWGEEYQVHLPPTFHAVAFYVMDEDALSRDDVIGKVCLTRDTIASHPKGFSGWAHLTEVDPDEEVQGEIHLRLEVWPGARACRLRCSVLEARDLAPKDRNGTSDPFVRVRYKGRTRETSIVKKSCYPRWNETFEFELQEGAMEALCVEAWDWDLVSRNDFLGKVVIDVQRLRVVQQEEGWFRLQPDQSKSRRHDEGNLGSLQLEVRLRDETVLPSSYYQPLVHLLCHEVKLGMQGPGQLIPLIEETTSTECRQDVATNLLKLFLGQGLAKDFLDLLFQLELSRTSETNTLFRSNSLASKSVESFLKVAGMQYLHGVLGPIINKVFEEKKYVELDPSKVEVKDVGCSGLHRPQTEAEVLEQSAQTLRAHLGALLSALSRSVRACPAVVRATFRQLFRRVRERFPGAQHENVPFIAVTSFLCLRFFSPAIMSPKLFHLRERHADARTSRTLLLLAKAVQNVGNMDTPASRAKEAWMEPLQPTVRQGVAQLKDFITKLVDIEEKDELDLQRTLSLQAPPVKEGPLFIHRTKGKGPLMSSSFKKLYFSLTTEALSFAKTPSSKKSALIKLANIRAAEKVEEKSFGGSHVMQVIYTDDAGRPQTAYLQCKCVNELNQWLSALRKVSINNTGLLGSYHPGVFRGDKWSCCHQKEKTGQGCDKTRSRVTLQEWNDPLDHDLEAQLIYRHLLGVEAMLWERHRELSGGAEAGTVPTSPGKVPEDSLARLLRVLQDLREAHSSSPAGSPPSEPNCLLELQT

SEQ ID NO: 634 - protein, 122 aa, Homo sapiens
  SITE (41): Xaa equals any of the naturally occurring L-amino acids
  SITE (44): Xaa equals any of the naturally occurring L-amino acids
AVCNEIINIAEKSVHYCSTVSHPLDFHHKVSPSDNKSSLIXSQXPQAQQRRVTPDRSQTSQDLFSYQALYSYIPQNDDELELRDGDIVDVMEKCDDGWFVGTSRRTKQFGTFPGNYVKPLYL

SEQ ID NO: 635 - protein, 350 aa, Homo sapiens
  SITE (191): Xaa equals any of the naturally occurring L-amino acids
GNLDKQTGKGSTALHYCCLTDNAECLKLLLRGKASIEIANESGETPLDIAKRLKHEHCEELLTQALSGRFNSHVHVEYEWRLLHEDLDESDDDMDEKLQPSPNRREDRPISFYQLGSNQLQSNAVSLARDAANLAKEKQRAFMPSILQNETYGALLSGSPPPAQPAAPSTTSAPPLPPRNVGKDPLTPTPXPPVAKTPSVMEALSQPSKPAPPGISQIRPPPLPPQPPSRLPQKKPAPGADKSTPLTNKGQPRGPVDLSATEALGPLSNAMVLQPPAPMPRKSQATKLKPKRVKALYNCVADNPDELTFSEGDVIIVDGEEDQEWWIGHIDGDPGRKGAFPVSFVHFIAD

SEQ ID NO: 636 - protein, 522 aa, Homo sapiens
QSMGVVLYVLVCGALPFDGPTLPILRQRVLEGRFRIPYFMSEDCEHLIRRMLVLDPSKRLTIAQIKEHKWMLIEVPVQRPVLYPQEQENEPSIGEFNEQVLRLMHSLGIDQQKTIESLQNKSYNHFAAIYFLLVERLKSHRSSFPVEQRLDGRQRRPSTIAEQTVAKAQTVGLPVTMHSPNMRLLRSALLPQASNVEAFSFPASGCQAEAAFMEEECVDTPKVNGCLLDPVPPVLVRKGCQSLPSNMMETSIDEGLETEGEAEEDPAHAFEAFQSTRSGQRRHTLSEVTNQLVVMPGAGKIFSMNDRPSLDSVDSEHDMASVHRDLNFLQDNPSLKDIMLANQPSPRMTSPFISLRPTNPAMQALSSQKREVHNRSPVSFREGRRASDTSLTQGIVAFRQHLQNLARTKGILELNKVQLLYEQIGPEADPNLAPAAPQLQDLASSCPQEEVSQQQESVSTLPASVHPQLSPRQSLETQYLQHRLQKPSLLSKAQNTCQLYCKEPPSTRPRIPGSTSSLVGGR

SEQ ID NO: 637 - protein, 113 aa, Homo sapiens
RASSSFQRLYLTHFRYTQTNGITCNILMEQWERLFEMGFASFCNILISLVPYSYLMLALTYPQEADTEVSLRRGDIWVMFEHAGAMGSLVSVGGEGTRWHLLAEANRNCTSPL

SEQ ID NO: 638 - protein, 946 aa, Homo sapiens
  SITE (459): Xaa equals any of the naturally occurring L-amino acids
  SITE (470): Xaa equals any of the naturally occurring L-amino acids
  SITE (808): Xaa equals any of the naturally occurring L-amino acids
HSVFEMLEQNLYDFLKQNKFSPLPLKYIRPILQQVATALMKLKSLGLIHADLKPENIMLVDPVRQPYRVKVIDFGSASHVSKAVCSTYLQSRYYRAPEIILGLPFCEAIDMWSLGCVIAELFLGWPLYPGASEYDQIRYISQTQGLPAEYLLSAGTKTTRFFNRDPNLGYPLWRLKTPEEHELETGIKSKEARKYIFNCLDDMAQVNMSTDLEGTDMLAEKADRREYIDLLKKMLTIDADKRITPLKTLNHQFVTMTHLLDFPHSNHVKSCFQNMEICKRRVHMYDTVSQIKSPFTTHVAPNTSTNLTMSFSNQLNTVHNQASVLASSSTAAAATLSLANSDVSLLNYQSALYPSSAAPVPGVAQQGVSLQPGTTQICTQTDPFQQTFIVCPPAFQTGLQATTKHSGFPVRMDNAVPIVPQAPAAQPLQIQSGVLTQGSCTPLMVATLHPQVATITPQXAVPFTLSCAAXRPALVEQTAAVLQAWPGGTQQILLPSTWQQLPGVALHNSVQPTAMIPEAMGSGQQLADWRNAHSHGNQYSTIMQQPSLLTNHVTLATAQPLNVGVAHVVRQQQSSSLPSKKNKQSAPVSSKSSLDVLPSQVYSLVGSSPLRTTSSYNSLVPVQDQHQPIIIPDTPSPPVSVITIRSDTDEEEDNKYKPSSSGLKPRSNVISYVTVNDSPDSDSSLSSPYSTDTLSALRGNSGSVLEGPGRVVADGTGTRTIIVPPLKTQLGDCTVATQASGLLSNKTKPVASVSGQSSGCCITPTGYRAQRGGTSAAQPLNLSQNQQSSAAPTSQERSSNPAPRRQQXFVAPLSQAPYTFQHGSPLHSTGHPHLAPAPAHLPSQAHLYTYAAPTSAAALGSTSSIAHLFSPQGSSRHAAAYTTHPSTLVHQVPVSVGPSLLTSASVAPAQYQHQFATQSYIGSSRGSTIYTGYPLSPTKISQYSYL

SEQ ID NO: 639 - protein, 268 aa, Homo sapiens; identical to SEQ ID NO: 617

SEQ ID NO: 640 - protein, 77 aa, Homo sapiens
  SITE (7): Xaa equals any of the naturally occurring L-amino acids
  SITE (17): Xaa equals any of the naturally occurring L-amino acids
  SITE (52): Xaa equals any of the naturally occurring L-amino acids
  SITE (67): Xaa equals any of the naturally occurring L-amino acids
  SITE (70): Xaa equals any of the naturally occurring L-amino acids
KMFCSFXINYARQLHYXSACNLPFICNKKIINTAGTSNAEVPLADPGMYQLXITLRRGQSLAARDRXGTXDPYVKFK

SEQ ID NO: 641 - protein, 116 aa, Homo sapiens
  SITE (7): Xaa equals any of the naturally occurring L-amino acids
  SITE (93): Xaa equals any of the naturally occurring L-amino acids
  SITE (104): Xaa equals any of the naturally occurring L-amino acids
RLRNSAXIMWNSSDANFSCYHESVLGYRYVAVSWGVVVAVTGTVGNVLTLLALAIQPKLRTRFNLLIANLTLADLLYCTLLQPFSVDTYLHLXWRTVPPSAGYXGSSFLPPILSPS

SEQ ID NO: 642 - protein, 281 aa, Homo sapiens
GCGRGGEARAVRTDSHRLSPVPCDLKTIVAAGSWQSQAVHLLGVLVSYCDFIMENQLAKSTEERTFQYQDSLPSLPVPSLEESLKKYLESVKPFANQEEYKKTEEIVQKFQSGIGEKLHQKLLERAKGKRNWLEEWWLNVAYLDVRIPSQLNVNFAGPAAHFEHYWPPKEGTQLERGSITLWHNLNYWQLLRKEKVPVHKVGNTPLDMNQFRMLFSTCKVPGITRDSSLGDRARRCLKKKKNKKKKQKKKKKKKKKKKKKKKKKKKKKKKKKKKKKKKKKK

SEQ ID NO: 643 - protein, 182 aa, Homo sapiens
  SITE (15): Xaa equals any of the naturally occurring L-amino acids
  SITE (121): Xaa equals any of the naturally occurring L-amino acids
  SITE (152): Xaa equals any of the naturally occurring L-amino acids
IRHEAGHWEHAGEHXAILTPLTDSKIISSHLPKEAISGLVCLVNCAIGMVFTMEAGNYWFDIFNDYAATLSLLLIVLVETIAVCYVYGLRRFESDLKAMTGRAVSWYWKVMWAGVTTADCXPLCLLPERLHPHGDPEVSSLGRLPGPARDQXLPGLCTGCHRAACGLLHHVHPPGGPGDFCS

SEQ ID NO: 644 - protein, 101 aa, Homo sapiens
SQLPPSPGGHEQQQATAPPSHRGGLGAEAGFGACGLRVSCPGCLVLSGLRPFQVSDPYVILPWLSPAPLGCNCFLHTKPLIGASGPSQKNLPRALGFMLSE

SEQ ID NO: 645 - protein, 487 aa, Homo sapiens
FKFFMEQHVENVIKTYQQKVNRRLQLEQEMAKAGLCEAEQEQMRKILYQKESNYNRLKRAKMDKSMFVKIKTLGIGAFGEVCLACKVDTHALYAMKTLRKKDVLNRNQVAHVKAERDILAEADNEWVVKLYYSFQDKDSLYFVMDYIPGGDMMSLLIRMEVFPEHLARFYIAELTLAIESVHKMGFIHRDIKPDNILIDLDGHIKLTDFGLCTGFRWTHNSKYYQKGSHVRQDSMEPSDLWDDVSNCRCGDRLKTLEQRARKQHQRCLAHSLVGTPNYIAPEVLLRKGYTQLCDWWSVGVILFEMLVGQPPFLAPTPTETQLKVINWENTLHIPAQVKLSPEARDLITKLCCSADHRLGRNGADDLKAHPFFSAIDFSSDIRKQPAPYVPTISHPMDTSNFDPVDEESPWNDASEGSTKAWDTLTSPNNKHPEHAFYEFTFRRFFDDNGYPFRCPKPSGAEASQAESSDLESSDLVDQTEGCQPVYV

SEQ ID NO: 646 - protein, 301 aa, Homo sapiens
  SITE (4): Xaa equals any of the naturally occurring L-amino acids
  SITE (7): Xaa equals any of the naturally occurring L-amino acids
TDSXGSXFPGRPTRPEILFEEYQFQAVLRVNAGALSAHRYFRDNPSELCCIIVDSGYSFTHIVPYCRSKKKKEAIIRINVGGKLLTNHLKEIISYRQLHVMDETHVINQVKEDVCYVSQDFYRDMDIAKLKGEENTVMIDYVLPDFSTIKKGFCKPREEMVLSGKYKSGEQILRLANERFAVPEILFNPSDIGIQEMGIPEAIVYSIQNLPEEMQPHFFKNIVLTGGNSLFPGFRDRVYSEVRCLTPTDYDVSVVLPENPITYAWEGGKLISENDDFEDMVVTREDYEENGHSVCEEKFDI

SEQ ID NO: 647 - protein, 191 aa, Homo sapiens
ARGQLHATRDGRKQVSRELGARRLVGSVTMAGLRNESEQEPLLGDTPGSREWDILETEEHYKSRWRSIRILYLTMFLSSVGFSVVMMSIWPYLQKIDPTADTSFLGWVIASYSLGQMVASPIFGLWSNYRPRKEPLIVSILISVAANCLYAYLHIPASHNKYYMLVARGLLGIGAGKVVCICLVVSYSHSF

SEQ ID NO: 648 - protein, 191 aa, Homo sapiens
  SITE (38): Xaa equals any of the naturally occurring L-amino acids
ILKPLPPGCSGNSRLHLRVHRHGTRSGGEQSWPTLFSXSALACGVVMVIPQKHYILGVVTAMVGKFAIGAAFGLIYLYTAELYPTIVRSLAVGSGSMVCRLASILAPFSVDLSSIWIFIPQLFVGTMALLSGVLTLKLPETLGKRLATTWEEAAKLESENESKSSKLLLTTNNSGLEKTEAITPRDSGLGE

SEQ ID NO: 649 - protein, 187 aa, Homo sapiens
  SITE (2): Xaa equals any of the naturally occurring L-amino acids
  SITE (6): Xaa equals any of the naturally occurring L-amino acids
FXAARXAASEAAYTGGMILELLLLQDIQDGQPHSAGHWAAPKRVEVLNAGGFKCPRHRLGCGHAGNRVAVANGLAHGDDVRDEVFSLELEGPEVLAYPAKANLDLICNKDPSGLADVLCHLGEVASRGNDLPSHTGQRLSEEGCNLPPADLPVSSLDSCRGLLTECLFQSILHMATRVMMPQPRELS

SEQ ID NO: 650 - protein, 271 aa, Homo sapiens
SHFRAHKSLRKLLYEIINFNPVICHTPRLVQDEVEIKGSSAGGLLLGAQQPPGTAEHQQPQPGEQPAPGAAGRGPLRHHPAAGGLRLPPARSPLSSGGSQRWRESPGTHSGVGGGEQLRRRRLRQRDPPADREGEREVLRGQRESPPPPQLPPELLTNPSGSAIQSSPSRFRRVPADNAGPRRQLAKGVPLRPGAEPPAPASDPDLEPTPPGGLKSPPLPCASGQGVPGTRRRQNKLGVETLLLRRPQLPPHSETFLPVLDSGTALTGRPL

SEQ ID NO: 651 - protein, 367 aa, Homo sapiens
FSTKGMTADEWAEKMPKGPPPTSPKATADRDILARLHKAVTSHYHAITQEFENFDTMKTNTISREEFRAICNRRVQILTDEQFDRLWNEMPVNAKGRLKYPDFLSRFSSETAATPMATGDSAVAQRGSSVPDVSEGTRSALSLPTQELRPGSKSQSHPCTPASTTVIPGTPPLQNCDPIESRLRKRIQGCWRQLLKECKEKDVARQGDINASDFLALVEKFNLDISKEECQQLIIKYDLKSNGKFAYCDFIQSCVLLLKAKESSLMHRMKIQNAHKMKEAGAETPSFYSALLRIQPKIVHCWRPMRRTFKSYDEAGTGLLSVADFRTVLRQYSINLSEEEFFHILEYYDKTLSSKISYNDFLRAFLQ

SEQ ID NO: 652 - protein, 101 aa, Homo sapiens
  SITE (2): Xaa equals any of the naturally occurring L-amino acids
PXMPARYPCGRKYPLMSQGIADGSSIPFYLPLDLHFYQIVHCILKFWVLSFIFPFPFKSFNGKKASEAWCKLKFLNGVEMQIIPSKIIQILLKFLVLRCCR

SEQ ID NO: 653 - protein, 298 aa, Homo sapiens
PVYSQSWHKFWFRWQRRWLQPDKRGKVVGTIMSGLLLGILLARTVAGLLANLGGWRTVFWVASVLMALMALALWRGLPQMKSETHLNYPQLLGSVFSMFISDKILRTRALLGCLTFANFSILWTSMAFLLAAPPFNYSDGVIGLFGLAGAAGALGARPAGGFADKGKSHHTTTFGLLLLLLSWLAIWFGHTSVLALIIGILVLDLTVQGVHITNQTVIYRIHPDARNRLTAGYMTSYFIGGAAGSLISASAWQHGGWAGVVWLARRLPCLTYWSGGEVFIVRKPQIKQSATVFVALHL

SEQ ID NO: 654 - protein, 137 aa, Homo sapiens
LSLFGNLVIMVSISHFKQLHSPTNFLILSMATTDFLLGFVIMPYSIMRSVESCWYFGDGFCKFHTSFDMMLRLTSIFHLCSIAIDRFYAVCYPLHYTTKMTNSTIKQLLAFCWSVPALFSFGLGVFSLPPLCFQAHG

SEQ ID NO: 655 - protein, 67 aa, Homo sapiens
  SITE (64): Xaa equals any of the naturally occurring L-amino acids
ASACRFWYPSEFLEPIHHRYQGTTAQIKTLMHYYRVPTIITKMEEIEMLGIGDDMEQLELEYWXIYP

SEQ ID NO: 656 - protein, 363 aa, Homo sapiens
  SITE (29): Xaa equals any of the naturally occurring L-amino acids
  SITE (294): Xaa equals any of the naturally occurring L-amino acids
  SITE (312): Xaa equals any of the naturally occurring L-amino acids
  SITE (316): Xaa equals any of the naturally occurring L-amino acids
  SITE (323): Xaa equals any of the naturally occurring L-amino acids
  SITE (335): Xaa equals any of the naturally occurring L-amino acids
SYQKLSKISVVPPTPPPVSESQCSRSPGXLQEFGQFRGFNKSVENLFLSLATHVKKLSKSQNDMTSEKHLLATGPRQCVGQTERRSQSDTAVNVTTRKVSAPDILKPLNQEDPKCSTNPILKQQNLPSSPAPSTIFSGGFRHGSLISIDSTCTEMGNFDNANVTGEIEFAIHYCFKTHSLEICIKACKNLAYGEEKKKKCNPYVKTYLLPDRSSQGKRKTGVQRNTVDPTFQETLKYQVAPAQLVTRQLQVSVWHLGTLARRVFLGEVIIPLATWDFEDSTTQSFRWHPLRAKXEKYEDSVPQSNGELTVRXKLVXPSRPRKXQEAQEGTDQPSXHGQLCLVVLGAKNLPVRPDGTLNSFVKG

SEQ ID NO: 657 - protein, 193 aa, Homo sapiens
PGFVLMGSSILTCHDRQAGSPKWSDRAPKCLLEQLKPCHGLSAPVYGARSPEKQLHPAGATIHFSCAPGYVLKGQASIKCVPGHPSHWSDPPPICRAASLDGFYNSRSLDVAKAPAASSTLDAAHIAAAIFLPLVAMVLLVGGVYFYFSRLQGKSSLQLPRPRPRPYNRITIESAFDNPTYETGETREYEVSI

SEQ ID NO: 658 - protein, 107 aa, Homo sapiens
  SITE (102): Xaa equals any of the naturally occurring L-amino acids
GDTPSLPERYPKELNAIMESMLNKNPSLRPSAIEILKIPYLDEQLQNLMCRYSEMTLEDKNLDCQKEAAHIINAMQKRIHLQTLRALSEVQKMTPRERMRLXKLQAG

SEQ ID NO: 659 - protein, 183 aa, Homo sapiens
  SITE (100): Xaa equals any of the naturally occurring L-amino acids
  SITE (136): Xaa equals any of the naturally occurring L-amino acids
  SITE (151): Xaa equals any of the naturally occurring L-amino acids
  SITE (168): Xaa equals any of the naturally occurring L-amino acids
  SITE (179): Xaa equals any of the naturally occurring L-amino acids
RTPTGNAPSSESDIDISSPNVSHDESIAKDMSLKDSGSDLSHRPKRRRFHESYNFNMKCPTPGCNSLGHLTGKHERHFSISGCPLYHNLSADECKVRAQXRDKQIEERMLSHRQDDNNRHATRHQAPTERQLRYKXKVAELRKKRNSGLSXEQKEKYMDTDRTYWNTXEPLLKNLPAVXLGSF

SEQ ID NO: 660 - protein, 48 aa, Homo sapiens
RHFETNNSRLLVSLFTPLVRALYDAHHTLSWMCDDASDCCQKKKKKKK

SEQ ID NO: 661 - protein, 166 aa, Homo sapiens
KQDVAMKLNDSNLFRQQALINGEWLDANNGEAIDVTNPANGDKLGSVPKMGADETRAAIDAANRALPAWRALTAKERATILRNWFNLMMEHQDDLARLMTLEQGKPLAEAKGEISYAASFIEWFAEEGKRIYGDTIPGHQADKRLIVIKQPIGVTAAITPWTPRRR

SEQ ID NO: 662 - protein, 199 aa, Homo sapiens
  SITE (6): Xaa equals any of the naturally occurring L-amino acids
  SITE (24): Xaa equals any of the naturally occurring L-amino acids
  SITE (184): Xaa equals any of the naturally occurring L-amino acids
REQKLXLHRGGGRSRTSGSLELLXTAETWDNGKPIRETSAADVPLAIDHFRYFASCIRAQEGGISEVDSETVAYHFHEPLGVVGQIIPWNFPLLMASWKMAPALAAGNCVVLKPARLTPLSVLLLMEIVGDLLPPGVVNVVNGAGGVIGEYLATSKRIAKVAFTGSTEVGQQIMQYATHNIIPXTLELGAKSPNISLLM

SEQ ID NO: 663 - protein, 356 aa, Homo sapiens
GPLLDRKGPRLMLGLGMFFWSLFQAMSGMVHNFTQFVLVRIGMGIGEAPMNPCGVKVINDWFNIKERGRPMGFFNAASTIGVAVSPPILAAMMLVMGWRGMFITIGVLGIFLAIGWYMLYRNREHVELTAVEQAYLNAGSVNARRDPLSFAEWRSLFRNRTMWGMMLGFSGINYTAWLYLAWLPGYLQTAYNLDLKSTGLMAAIPFLFGAAGMLVNGYVTDWLVKGGMAPIKSRKICIIAGMFCSAAFTLIVPQATTSMTAVLLIGMALFCIHFAGTSCWGLIHVAVASRMTASVGSIQNFASFICASFAPIITGFIVDTTHSFRLALIICGCVTAAGALAYIFLVRQPINDPRKD

SEQ ID NO: 664 - protein, 334 aa, Homo sapiens
ALTSEERTRWAKAREYLIGLDPENLALLEKIQSSLLVYSMEDSSPHVTPEDYSEIIAAILIGDPTVRWGDKSYNLISFSNGVFGCNCDHAPFDAMIMVNISYYVDEKIFQNEGRWKGSEKVRDIPLPEELIFIVDEKVLNDINQAKAQYLREASDLQIAAYAFTSFGKKLTKNKMLHPDTFIQLALQLAYYRLHGHPGCCYETAMTRHFYHGRTETMRSCTVEAVRWCQSMQDPSVNLRERQQKMLQAFAKHNKMMKDCSAGKGFDRHLLGLLLIAKEEGLPVPELFTDPLFSKRFVVACSAWKSCPETDAEKLVQLTFCAFHDMIQLMNSTHL

SEQ ID NO: 665 - protein, 239 aa, Homo sapiens
  SITE (113): Xaa equals any of the naturally occurring L-amino acids
  SITE (127): Xaa equals any of the naturally occurring L-amino acids
  SITE (203): Xaa equals any of the naturally occurring L-amino acids
  SITE (229): Xaa equals any of the naturally occurring L-amino acids
  SITE (231): Xaa equals any of the naturally occurring L-amino acids
IPKFKIGGKEVFRSKIIHKNLNPVWEEKACILVDHLREPLYIKVFDYDFGLQDDFMGSAFLDLTQLELNRPTDVTLTLKDPHYPDHDLGIILLSVILTPKEGESRDVTMLMRXSWKRSSKELSENEXVGSYFSVKSLFWRTCGRPALPVLGFCRAELQNPYCKNVQFQTQSLRLSDLHRKSHLWRGIVSITLIEGRDLKAMDXNGLSDPYVKFRLGIRRPGAGLCQNVXLXGGNNWISL

SEQ ID NO: 666 - protein, 728 aa, Homo sapiens
TRPGQPRRGSALPAWRCGAAALATFPAPALPGLMYRALYAFRSAEPNALAFAAGETFLVLERSSAHWWLAARARSGETGYVPPAYLRRLQGLEQDVLQAIDRAIEAVHNTAMRDGGKYSLEQRGVLQKLIHHRKETLSRRGPSASSVAVMTSSTSDHHLDAAAARQPNGVCRAGFERQHSLPSSEHLGADGGLYQIPLPSSQIPPQPRRAAPTTPPPPVKRRDREALMASGSGGHNTMPSGGNSVSSGSSVSSTSLDTLYTSSSPSEPGSSCSPTPPPVPRRGTHTTVSQVQPPPSKASAPEPPAEEEVATGTTSASDDLEALGTLSLGTTEEKAAAEAAVPRTIGAELMELVRRNTGLSHELCRVAIGIIVGHIQASVPASSPVMEQVLLSLVEGKDLSMALPSGQVCHDQQRLEVIFADLARRKDDAQQRSWALYEDEGVIRCYLEELLHILTDADPEVCKKMCKRNEFESVLALVAYYQMEHRASLRLLLLKCFGAMCSLDAAIISTLVSSVLPVELARDMQTDTQEHLGTPFAQFLLNIVEDGLPLDTTEQLPDLCVNLLLALNLHLPAADQNVIMAALSKHANVKIFSEKLLLLLNRGDDPVRIFKHEPQPPHSVLKFLQDVFGSPATAAIFYHTDMMALIDITVRHIADLSPGDKLRMEYLSLMHAIVRTTPYLQHRHRLPDLQAILRRILNEEETSPQCQMDRMIVREMCKEFLVLGEAPS

SEQ ID NO: 667 - protein, 308 aa, Homo sapiens
CLAHLELPVDPEVKALVPDRATAVLDRACLEPVAAGRGQPESHVAVRGGHCGKEQVPSGGQEPFPAAQTHFLPSPRAPCGLRLRGRGSGGQRQSPSCHLPPRSSSQLPPLGPAHRPTRLHQIQPQHPPPQHPPPPSAQHRGQGGAHSPRSLEGRRWACRTRTVSRQVLDTSACRGGRGETCYGPMKPRVTGATKEAGAVPQGLILNPRPILHLIRILNQQEETSYLHHDACQHLHNALRRLWAKGFAYINSFIAQPPYAQILFTMAHSTRKLRHREAATCLRSTIGVGARAGWLQIYASHRPASTFSG

SEQ ID NO: 668 - protein, 155 aa, Homo sapiens
  SITE (126): Xaa equals any of the naturally occurring L-amino acids
  SITE (130): Xaa equals any of the naturally occurring L-amino acids
  SITE (133): Xaa equals any of the naturally occurring L-amino acids
SSQTCRSWSGSSSRILPESLASSEASTLEAMGRKEEDDCSSWKKQTTNIRKTFIFMEVLGSGAFSEVFLVKQRLTGKLFALKCIKKSPAFRDSSLENEIAVLKKIKHENIVTLEDIYESTTHYYLXMQLXSGXELFDRILDGVSTQRRMPGCGSS

SEQ ID NO: 669 - protein, 144 aa, Homo sapiens
  SITE (3): Xaa equals any of the naturally occurring L-amino acids
  SITE (4): Xaa equals any of the naturally occurring L-amino acids
  SITE (18): Xaa equals any of the naturally occurring L-amino acids
GVXXDYIRHLHDSQHVAXFHRGRFFRMGTHSRNSLLSPRALEQQFQRILDDPSPACPHEEHLAALTAAPRGTWAQVRTSLKTQAAEALEAVEGAAFFVSLDAEPAGLTREDPAASLDAYAHALLAGRGHDRWFDKSFTLIVFSN

SEQ ID NO: 670 - protein, 157 aa, Homo sapiens
  SITE (31): Xaa equals any of the naturally occurring L-amino acids
  SITE (33): Xaa equals any of the naturally occurring L-amino acids
KEMNPLPTQLSTGAISFLRSLLEPDPVKRPXIXQALANRWLNENYTGKVPCNVTYPNRISLEDLSPSVVLHMTEKLGYKNSDVINTVLSNRACHILAIYFLLNKKLERYLSGKSDIQDSLCYKTRLYQIEKYRAPKESYEASLDTWTRDLEFHAVQR

SEQ ID NO: 671 - protein, 179 aa, Homo sapiens
CRSSKDAVGQISVHVDITATPGTGDHKVTVKVIAINDLNWQTTAMFRPFVEVCILGPNLGDKKRKQGTKTKSNTWSPKYNETFQFILGKENRPGAYELHLSVKDYCFAREDRIIGMTVIQLQNIAEKGSYGAWYPLLKNISMDETGLTILRILSQRTSDDVAKEFVRLKSETRSTEESA

SEQ ID NO: 672 - protein, 488 aa, Homo sapiens
NFSPRAVRPGAPAPESPLRLLKLAFYQLRTMLRVIVESASNIPKTKFGKPDPIVSVIFKDEKKKTKKVDNELNPVWNEILEFDLRGIPLDFSSSLGIIVKDFETIGQNKLIGTATVALKDLTGDQSRSLPYKLISLLNEKGQDTGATIDLVIGYDPPSAPHPNDLSGPSVPGMGGDGEEDEGDEDRLDNAVRGPGPKGPVGTVSEAQLARRLTKVKNSRRMLSNKPQDFQIRVRVIEGRQLSGNNIRPVVKVHVCGQTHRTRIKRGNNPFFDELFFYNVNMTPSELMDEIISIRVYNSHSLRADCLMGEFKIDVGFVYDEPGHAVMRKWLLLNDPEDTSSGSKGYMKVSMFVLGTGDEPPPERRDRDNDSDDVESNLLLPAGIALRWVTFLLKIYRAEDIPQMDDAFSQTVKEIFGGNADKKNLVDPFVEVSFAGKKVCTNIIEKNANPEWNQVVNLQIKFPSVCEKDKTNQVYDWDRLTKNDVVGTS

SEQ ID NO: 673 - protein, 278 aa, Homo sapiens
KHRPEAEAARWSQDEMPLPGACRPGLFPAAPPLWALESPGKPQRAGVFRGTCLCPGGVLCSPHGQALWVGAVRCPFLGASGGRALPTPPQPQTARGSPAPRPRYPCRSEKGAWPPSLQLDELLSTADPGLDSELLRHWAEPDGPSRTDRLLAGTQPSLPVVGSLTYLQGARVSGSHVRGSPGLSAGSYQRPSSPSCTSSTTSPLLTRSASGPPFSWSATTVYLPGTSFLGPNPPSSSASDELICSSALDQPPSSSGASSEWDVLLQPLPFSGGFADAW

SEQ ID NO: 674 - protein, 265 aa, Homo sapiens
  SITE (15): Xaa equals any of the naturally occurring L-amino acids
  SITE (16): Xaa equals any of the naturally occurring L-amino acids
  SITE (92): Xaa equals any of the naturally occurring L-amino acids
DPPAMALQLGGGPGXXLSQWGKAGVTTAAAVQRRGAGEGTGSGFNGGLESGVWPTGWSPVWGGASRMDPGHTPRRLTSGKRSLHGGVGSPEXPSLAQPCPNEAALGIWLPFLAFWAVWLQPRPLCGCVQASAAPRAQTPRAISAPELLIFLKRLAALTAMKFFFQRLFMRYFLSKIWDLRRRLQRLAFSARLLSQGWARHWAAFIRALWSLTMRLETKSLASSDTASKVSSSKYQLPDRTLFRVSVSSSPRKGERPLSLGLNLAG

SEQ ID NO: 675 - protein, 390 aa, Homo sapiens
  SITE (388): Xaa equals any of the naturally occurring L-amino acids
RNRRTRLALWGRGWWSKMAAHLSYGRVNLNVLREAVRRELREFLDKCAGSKAIVWDEYLTGPFGLIAQYSLLKEHEVEKMFTLKGNRLPAADVKNIIFFVRPRLELMDIIAENVLSEDRRGPTRDFHILFVPRRSLLCEQRLKDLGVLGSFIHREEYSLDLIPFDGDLLSMESEGAFKECYLEGDQTSLYHAAKGLMTLQALYGTIPQIFGKGECARQVANMMIRMKREFTGSQNSIFPVFDNLLLLDRNVDLLTPLATQLTYEGLIDEIYGIQNSYVKLPPEKFAPKKQGDGGKDLPTEAKKLQLNSAEELYAEIRDKNFNAVGSVLSKKAKIISAAFEERHNAKTVGEIKQFVSQLPHMQAARGSLANHTSIAELIKMSLLLKTFXIN

SEQ ID NO: 676 - protein, 245 aa, Homo sapiens
  SITE (32): Xaa equals any of the naturally occurring L-amino acids
  SITE (33): Xaa equals any of the naturally occurring L-amino acids
  SITE (45): Xaa equals any of the naturally occurring L-amino acids
  SITE (72): Xaa equals any of the naturally occurring L-amino acids
HPGGAPRYNGEFFISQLPRGLSYIPPGLFFAXXPKPQNLLISDTXELKLADSVLQEQNPSLATHTPTNVTLXYRPPDVLLGSTEYSTCLDMWGVGCIFVEMIQGVAAFPGMKDIQDQLERIFLVLGTPNEDTWPGVHSLPHFKPERFTLYSSKNLRQAWNKLSYVNHAEDLASKLLQCSPKNRLSAQAALSHEYFSDLPPRLWELTDMSSIFTVPNVRLQPEAGESMRAFGKNNSYGKSLSNSKH

SEQ ID NO: 677 - protein, 141 aa, Homo sapiens
EKIMQATATTLDHEQEYTPINSRNKVLVASLIGTAIEFFDFYIYATAAVIVFPHIFFPQGDPTAATLQSLATFAIAFVARPIGSAVFGHFGDRVGRKATLVASLLTMGISTVVIGLLPGYATIGIFAPLLWRWLDLVRVWA

SEQ ID NO: 678 - protein, 137 aa, Homo sapiens
  SITE (114): Xaa equals any of the naturally occurring L-amino acids
  SITE (116): Xaa equals any of the naturally occurring L-amino acids
RGLLKLLAGASTKKKSRSPPSVSPTHDPQVAVDALLQGAVGPEVSSLSIHGRAGSCPIESEMQGAMGMEPLHRKAGSLDLNFTSPSRQAPLSMAAIRPEPKLLPRERYRVVVSXPXQSEAEIELKEGDIVFVHKKRD

SEQ ID NO: 679 - protein, 129 aa, Homo sapiens
KHNFRATTECQALAYGAQGNYPKGLKHYGVSGKFIQGRQKTGLSVNAEASCAVRGQRGARVPSQGRCGALLHSGLAGLGSGGGESIGAPSQFHRGLGALAGDWGPLGEGVIETCQEALDKHVLKSWVAS

SEQ ID NO: 680 - protein, 294 aa, Homo sapiens
RTRGGLYMLFLLVLVFFLMGLVGFMICHVLKKKGYRCRTSRGSEPDDAQLQPPEDDDMNEDTVERIVRCIIQNEANAEALKEMLGDSEGEGTVQLSSVDATSSLQDGAPSHHHTVHLGSAAPCLHCSRSKRPPLVRQGRSKEGKSRPRTGETTVFSVGRFRVTHIEKRYGLHEHRDGSPTDRSWGSGGGQDPGGGQGSGGGQPKAGMPAMERLPPERPQPQVLASPPVQNGGLRDSSLTPRALEGNPRASAEPTLRAGGRGPSPGLPTQEANGQPSKPDTSDHQVSLPQGAGSM

SEQ ID NO: 681 - protein, 226 aa, Homo sapiens
PTRPEELWELRGHHYLHQESLKPAPVLVEKPLPEWPVPQFINLFLPEFPIRPIRGQQQLKILGLVAKGSFGTVLKVLDCTQKAVFAVKVVPKVKVLQRDTVRQCKEEVSIQRQINHPFVHSLGDSWQGKRHLFIMCSYCSTDLYSLWSAVGCFPEASIRLFAAELVLVLCYLHDLGIMHRDVKMENILLDERGHLKLTDFGLSRHVPQGAQAYTICGTLQYMGERG

SEQ ID NO: 682 - protein, 74 aa, Homo sapiens
  SITE (8): Xaa equals any of the naturally occurring L-amino acids
  SITE (55): Xaa equals any of the naturally occurring L-amino acids
  SITE (61): Xaa equals any of the naturally occurring L-amino acids
  SITE (68): Xaa equals any of the naturally occurring L-amino acids
GTHRPAVXPIESLRLMCLLSITENGLIPKDYRSLKTQYLQSYGPEHLLTFSNLRXAGLLTXQAPGDNXTAWRVK

SEQ ID NO: 683 - protein, 412 aa, Homo sapiens
ASCPIRADPARDAAPGGCLAEAGARAESSSPERLCWMPWRNKEASSPSSANPPLEALQSPSFRGNMADKLKDPSTLGFLEAAVKISHTSPDIPAEVQMSVKEHIMRHTRLQRQTTEPASSTRHTSFKRHLPRQMHVSSVDYGNELPPAAEQPTSIGRIKPELYKQKSVDGEDAKSEATKSCGKINFSLRYDYETETLIVRILKAFDLPAKDFCGSSDPYVKIYLLPDRKCKLQTRVHRKTLNPTFDENFHFPVPYEELADRKLHLSVFDFDRFSRHDMIGEVILDNLFEASDLSRETSIWKDIQYATSESVDLGEIMFSLCYLPTAGRLTLTVIKCRNLKAMDITGYSDPYVKVSLLCDGRRLKKKKTTIKKTLSILSTMRPSSLTFPRKTWIKSACSSQSWTMIEWATMRS

SEQ ID NO: 684 - protein, 315 aa, Homo sapiens
HEPVPTSMPCPVLLGPALDLGWRRMELLHRSSERTLSYAKARQEPEEQSLQKLYQNREKSEEQLTLKQEEAFRSYFEIFNGPGEVDAQSLKNILLLMGFSVTLAQVEDALMSADVNGDGRVDFKDFLAVMTDTRRFFCSVEQNALSDMAPHNPHTLLFEILSLLVEMLALPEAVLEEITNYYQKKLKEGTCKAQEMEAAVGRLRLQKLPYNPQQEESSEVPERKVLSILSRLKQQNYAPNLQSPYAQVPCILLCPQLDKKMVRRQPSNHYALDQCTPPGLDPDIRSPFFQSGSQGNREHNSDSRKWLSSVPARTH

SEQ ID NO: 685 - protein, 174 aa, Homo sapiens
FNLAAYHQLFVGTERIRAPEIIFQPSLIGEEQAGIAETLQYILDRYPKDIQEMLVQNVFLTGGNTMYPGMKARMEKELLEMRPFRSSFQVQLASNPVLDAWYGARDWALNHLDDNEVWITRKEYEEKGGEYLKEHCASNIYVPIRLPKQASRSSDAQASSKGSAAGGGGAGEQA

SEQ ID NO: 686 - protein, 1031 aa, Homo sapiens
QGKSNRTMAQFPTPFGGSLDIWAITVEERAKHDQQFHSLKPISGFITGDQARNFFFQSGLPQPVLAQIWALADMNNDGRMDQVEFSIAMKLIKLKLQGYQLPSALPPVMKQQPVAISSAPAFGMGGIASMPPLTAVAPVPMGSIPVVGMSPTLVSSVPTAAVPPLANGAPPVIQPLPAFAHPAATLPKSSSFSRSGPGSQLNTKLQKAQSFDVASVPPVAEWAVPQSSRLKYRQLFNSHDKTMSGHLTGSCLGPQARTILMQSSLPQAQLASIWNLSDIDQDGKLTAEEFILAMHLIDVAMSGQPLPPVLPPEYIPPSFRRVRSGSGISVISSTSVDQRLPEEPVLEDEQQQLEKKLPVTFEDKKRENFERGNLELEKRRQALLEQQRKEQERLAQLERAEQERKERERQEQERKRQLELEKQLEKQRELERQREEERRKEIERREAAKRELERQRQLEWERNRRQELLNQRNKEQEDIVVLKAKKKTLEFELEALNDKKHQLEGKLQDIRCRLTTQRQEIESTNKSRELRIAEITHLQQQLQESQQMLGRLIPEKQILNDQLKQVQQNSLHRDSLVTLKRALEAKELARQHLRDQLDEVEKETRSKLQEIDIFNNQLKELREIHNKQQLQKQKSMEAERLKQKEQERKIIELEKQKEEAQRRAQERDKQWLEHVQQEDEHQRPRKLHEEEKLKREESVKKKDGEEKGKQEAQDKLGRLFHQHQEPAKPAVQAPWSTAEKGPLTISAQENVKVVYYRALYPFESRSHDEITIQPGDIVMVDESQTGEPGWLGGELKGKTGWFPANYAEKIPENEVPAPVKPVTDSTSAPAPKLALRETPAPLAVTSSEPSTTPNNWADFSSTWPTSTNEKPETDNWDAWAAQPSLTVPSAGQLRQRSAFTPATATGSSPSPVLGQPDFLLHPSMRLGHMQPRIVLLFPDPLQCSTSRLLPMLRPRPGVPFLRSPSCQSPSHPSRPISDAAPSVKFTLMPPGRIHPCFLFIPAVNSRNSFLGYFILPGGTLGCFYLCLPHYL

SEQ ID NO: 687 - protein, 223 aa, Homo sapiens
ARGDISAYEELVSKLNLLVEDELKQIAENIESINQNKAPSKYIGNYAILDHLGSGAFGCVYKVRKHSGQNLLAMKEVNLHNPAFGKDKKDRDSSVRNIVSELTIIKEQLYHPNIVRYYKTFLENDRLYIVMELIEGAPLGEHFSSLKEKHHHFTEERLWKIFIQLCLALRYLHKEKRIVHRDLTPNNIMLGDKDKVTVTDFGLAKQKQENSKLTSVVGTILYS

SEQ ID NO: 688 - protein, 234 aa, Homo sapiens
AGLPGHSPYEGRGSQWWGLGGGQGAVGSAGGPFGGDGGSARVGWCRGAPAGGGGAPQLLLPPLGQGCILHALQEEALPLAPVECHEGGVETRAHCGPRGLEHVGRPERGRGARAAVLQPRAAPQSLELQPLGGVHGQEPSDQLLGFLGYTLPGLPVKGEAPLADFAHDLGRLALPALARGPLEGDLPRQHHVQNDAQAPEVAGLVVALLRQQLGGSVLQREAGRLHGHPGTLRP

SEQ ID NO: 689 - protein, 224 aa, Homo sapiens
  SITE (183): Xaa equals any of the naturally occurring L-amino acids
  SITE (202): Xaa equals any of the naturally occurring L-amino acids
FSPLISARFGMGSMPNLSIPQPLPPAAPITSLSSATSGTNLPPLMMPTPLVPSVSTSSLPNGTASLIQPLPIPYSSSTLPHGSSYSLMMGGFGGASIQKAQSLIDLGSSSSTSSTASLSGNSPKTGTSEWAVPQPTRLKYRQKFNTLDKSMSGYLSGFQARNALLQSNLSQTQLATIWTLADXDGDGQLKAEEFILAMHLTXMAKAGQPLPLTLPPELVPPSFR

SEQ ID NO: 690 - protein, 170 aa, Homo sapiens
  SITE (132): Xaa equals any of the naturally occurring L-amino acids
  SITE (136): Xaa equals any of the naturally occurring L-amino acids
  SITE (137): Xaa equals any of the naturally occurring L-amino acids
GQWSTQQAANMLCLCLYVPVIGEAQTEFQYFESKGLPAELKSIFKLSVFIPSQEFSTYRQWKQKIVQAGDKDLDGQLDFEEFVHYLQDHEKKLRLVFKSLDKKNDGRIDAQEIMQSLRDLGVKISEQQAEKXLKSXXKNGTMTIDWNEWRDYHLLHPVENIPEIILYWSI

SEQ ID NO: 691 - protein, 169 aa, Homo sapiens
SVVVVAMFFSEARARSRTWEASPSEHRKWVEVFKACDEDHKGYLSREDFKTAVVMLFGYKPSKIEVDSVMSSINPNTSGILLEGFLNIVRKKKEAQRYRNEVRHIFTAFDTYYRGFLTLEDFKKAFRQVAPKLPERTVLEVFREVDRDSDGHVSFRDFEYALNYGQKEA

SEQ ID NO: 692 - protein, 324 aa, Homo sapiens
  SITE (91): Xaa equals any of the naturally occurring L-amino acids
  SITE (279): Xaa equals any of the naturally occurring L-amino acids
  SITE (290): Xaa equals any of the naturally occurring L-amino acids
  SITE (322): Xaa equals any of the naturally occurring L-amino acids
ILEIFFRHLFAQVLDINQADAGTLPLDSSQKVREALTCELSRAEFAESLGLKPQDMFVESMFSLADKDGNGYLSFREFLDILVVFMKGSPXDKSRLMFTMYDLDENGFLSKDEFFTMMRSFIEISNNCLSKAQLAEVVESMFRESGFQDKEELTWEDFHFMLRDHDSELRFTQLCVKGGGGGGNGIRDIFKQNISCRVSFITRTPGERSHPQGLGPPAPEAPELGGPGLKKRFGKKAAVPTPRLYTEALQEKMQRGFLAQKLQQYKRFVENYRRHIVCXAIFSAICVGVXADRAYYYGFALPPFGHCTDHPRGHHPCHEARXPA

SEQ ID NO: 693 - protein, 244 aa, Homo sapiens
  SITE (8): Xaa equals any of the naturally occurring L-amino acids
  SITE (42): Xaa equals any of the naturally occurring L-amino acids
  SITE (43): Xaa equals any of the naturally occurring L-amino acids
  SITE (169): Xaa equals any of the naturally occurring L-amino acids
  SITE (220): Xaa equals any of the naturally occurring L-amino acids
  SITE (222): Xaa equals any of the naturally occurring L-amino acids
GDFLGQAXCASGTMLRWLRDFVLPTAACQDAEQPTRYETLFXXLDRNGDGVVDIGELQEGLRNLGIPLGQDAEEKIFTTGDVNKDGKLDFEEFMKYLKDHEKKMKLAFKSLDKNNDGKIEASEIVQSLQTLGLTISEQQAELILQSIDVDGTMTVDWNEWRDYFLFNPXTDIEEIIRFWKHSTGIDIGDSLTIPDEFTEDEKKSGQWWRQLLAGGIAGAXSXTSTGPLDRLKIMMQVTGQNQTK

SEQ ID NO: 694 - protein, 120 aa, Homo sapiens
HASAEIWALSDLNKDGKMDQQEFSIAMKLIKLKLQGQQLPVVLPPIMKQPPMFSPLISARFGMGSMPNLSIPQPLPPAAPITSLSSATSGTNLPPLMMPTPLVPSVSTSSLPNGNHLQYH

SEQ ID NO: 695 - protein, 578 aa, Homo sapiens
  SITE (1): Xaa equals any of the naturally occurring L-amino acids
  SITE (12): Xaa equals any of the naturally occurring L-amino acids
  SITE (18): Xaa equals any of the naturally occurring L-amino acids
  SITE (353): Xaa equals any of the naturally occurring L-amino acids
XIVYHDRQRIVXLFADAXAQRRSYAETRCSRVNEFKQSVNLLFHTLLFCFFYLTCFIPNFIRLKIKCAAGYNFAFRYFRTSYLPRIIPRFTDAPLILAKDLSMAGNVQEKQLRWYNIALMSFITVWGFGNVVNNYANQGLVVVFSWVFIFALYFTPYALIVGQLGSTFKDGKGGVSTWIKHTMGPGLAYLAAWTYWVVHIPYLAQKPQAILIALGWAMKGDGSLIKEYSVVALQGLTLVLFIFFMWVASRGMKSLKIVGSVAGIAMFVMSLLYVAMAVTAPAITEVHIATTNITWETFIPHIDFTYITTISMLVFAVGGAEKISPYVNQTRNPGKEFPKGMLCLAVMVAVCAXLGSLAMGMMFDSRNIPDDLMTNGQYYAFQKLGEYYNMGNTLMVIYAIANTLGQVAALVFSIDAPLKVLLGDADSKYIPASLCRTNASGTPVNGYFLTLVLVAILIMLPTLGIGDMNNLYKWLLNLNSVVMPLRYLWVFVAFIAVVRLAQKYKPEYVFIRNKPLAMTVGIWCFAFTAFACLTGIFPKMEAFTAEWTFQLALNVATPFVLVGLGLIFPLLARKANSK

SEQ ID NO: 696 - protein, 160 aa, Homo sapiens
  SITE (2): Xaa equals any of the naturally occurring L-amino acids
  SITE (5): Xaa equals any of the naturally occurring L-amino acids
  SITE (16): Xaa equals any of the naturally occurring L-amino acids
PXLVXIFAIICIGCRXVAGMVGRLKFMILPMVAFGGKAVEGKGYYYPPTLLLDVRQEMSIMHEETFGPVLPVVAFDTLEDAISMANDSDYGLTSSIYTQNLNVAMKAIKGLKFGETYINRENFEAMQGFHAGWRKSGIGGADGKHGLHEYLQTQVVYLQS

SEQ ID NO: 697 - protein, 249 aa, Homo sapiens
KIAFTGSTEVGKLIQEAAGRSNLKRVTLELGGKSPNIIFADADLDYAVEQAHQGVFFNQGQCCTAGSRIFVEESIYEEFVRRSVERAKRRIVGSPFDPTTEQGPQIDKKQYNKILELIQSGVAEGAKLECGGKGLGRKGFFIEPTVFSNVTDDMRIAKEEIFGPVQEILRFKTMDEVIERANNSDFGLVAAVFTNDINKALTVSSAMQAGTVWINCYNALNAQSPFGGFKMSGKWERNGRIWLAGVLRS

SEQ ID NO: 698 - protein, 113 aa, Homo sapiens
REQKLELHRGGGRSRTSGSPGLAAAIGPTIFVDVDPNASLSREEIFGPVLVVTRFTSEEQALQLANDSQYGLGAAVWTRDLSRAHRMSRRLKAGSVFVNNYNDGDMTVPFGRL

SEQ ID NO: 699 - protein, 238 aa, Homo sapiens
  SITE (66): Xaa equals any of the naturally occurring L-amino acids
  SITE (160): Xaa equals any of the naturally occurring L-amino acids
  SITE (224): Xaa equals any of the naturally occurring L-amino acids
  SITE (227): Xaa equals any of the naturally occurring L-amino acids
  SITE (228): Xaa equals any of the naturally occurring L-amino acids
  SITE (231): Xaa equals any of the naturally occurring L-amino acids
GTRELGGKSPNIIFADADLDYAVEQAHQGVFFNQGQCCTAGSRIFVEESIYEEFVRRSVERAKRRXVGSPFDPTTEQGPQIDKKQYNKILELIQSGVAEGAKLECGGKGLGRKGFFIEPTVFSNVTDDMRIAKEEIFGPVQEILRFKTMDEVIERANNSXFGLVAAVFTNDINKALTVSSAMQAGTVWINCYNALNAQSPFGGFKMSGNGRKMGRIWLSCECLXFLXXWCXKWTLATY

SEQ ID NO: 700 - protein, 78 aa, Homo sapiens
DQINNFFINKRCICTLNLFDNFAINTKEKNRFTFISKWLQSHNVVSLTAKCRISSSFSSFFNFLNKGCIALQGPHQAW

SEQ ID NO: 701 - protein, 299 aa, Homo sapiens
GTRRNSIQIYLLNVAIADLLLIFCLPFRIMYHINQNKWTLGVILCKVVGTLFYMNMYISIILLGFISLDRYIKINRSIQQRKAITTKQSIYVCCIVWMLALGGFLTMIILTLKKGGHNSTMCFHYRDKHNAKGEAIFNFILVVMFWLIFLLIILSYIKIGKNLLRISKRRSKFPNSGKYATTARNSFIVLIIFTICFVPYHAFRFIYISSQLNVSSCYWKEIVHKTNEIMLVLSSFNSCLDPVMYFLMSSNIRKIMCQLLFRRFQGEPSRSESTSEFKPGYSLHDTSVAVKIQSSSKST

SEQ ID NO: 702 - protein, 242 aa, Homo sapiens
RLFKVFPYIPWGPDVNNTVCTNERGWITYQGFLSQWTLTTYLDVQRCLEYLGYLGYSILTEQESQASAVTVTRDKKIDLQKKQTQRNVFRCNVIGVKNCGKSGVLQALLGRNLMRQKKIREDHKSYYAINTVYVYGQEKYLLLHDISESEFLTEAEIICDVVCLVYDVSNPKSFEYCARIFKQHFMDSRIPCLIVAAKSDLHEVKQNTVFHLLISAGNTKCLHHKPSLAILLMPPVRISLLN

SEQ ID NO: 703 - protein, 175 aa, Homo sapiens
  SITE (1): Xaa equals any of the naturally occurring L-amino acids
XFFFWQGKRRLIAMVPAGRGSAGPACGPTSPGWPQGVPLGNGPPGVGQHVCPVLQGLPRGPGTQVHLAYGLSSERQAAVPDSQHQVHILDLAEGHQEGEGLIEVGGRRALFGGCLSLLPLPLVQHELDLHVRLCKSWTQALSLQHHHGQPGLAGDVPEREAQLPHLFGLSGNRGP

SEQ ID NO: 704 - protein, 103 aa, Homo sapiens
  SITE (3): Xaa equals any of the naturally occurring L-amino acids
AFXVGACSAWTRATAAFQIEPEVIVEDGDDRAVMHWAPIGVVGAIGPWNWPMMISIWQIAPALRMGNAIVVKPSEQTPLSVLALAHVIERGCCPRGCCRLLAG

SEQ ID NO: 705 - protein, 156 aa, Homo sapiens
  SITE (111): Xaa equals any of the naturally occurring L-amino acids
KHSLIKVLRLVCLQSVCNSGLKQKVLDYYKREILQTYGYEHILTLHNLEKAGLLKPQTGGSNNYPTIRKTLRLWMDDVNEQNPTDISYVYSGYAPLSVRLAQLLSRPGWRXSRRSSASSQGPTLRSGSTAHRTAEETSTGRKPSDSDIFPWGRNLR

SEQ ID NO: 706 - protein, 284 aa, Homo sapiens
  SITE (138): Xaa equals any of the naturally occurring L-amino acids
  SITE (146): Xaa equals any of the naturally occurring L-amino acids
ASPVWAGPSPSHLSIPPSPAMALKGRALYDFHSENKEEISIQQDEDLVIFSETSLDGWLQGQNSRGETGLFPASYVEIVRSGISTNHADYSSSPAGSPGAQVSLYNSPSVASPARSGGGSGFLSNQGSFEEDDDDDWXDWDDGCTXVEEPRAGGLGTNGHPPLNLSYPGAYPSQHMAFRPKPPLERQDSLASAKRGSVVGRNLNRFSCFVRSGVEAFILGDVPMMAKIAETYSIEMGPRGPQWKANPHPFACSVEDPTKQTKFKGIKSYISYKLTPHPKKKKKK

SEQ ID NO: 707 - protein, 308 aa, Homo sapiens
  SITE (303): Xaa equals any of the naturally occurring L-amino acids
QLSPSQAPAGAQEVARRVTVGSASHGGRRSTMATTVSTQRGPVYIGELPQDFLRITPTQQQRQVQLDAQAAQQLQYGGAVGTVGRLNITVVQAKLAKNYGMTRMDPYCRLRLGYAVYETPTAHNGAKNPRWNKVIHCTVPPGVDSFYLEIFDERAFSMDDRIAWTHITIPESLRQGKVEDKWYSLSGRQGDDKEGMINLVMSYALLPAAMVMPPQPVVLMPTVYQQGVGYVPITGMPAVCSPGMVPVALPPAAVNAQPRCSEEDLKAIQDMFPNMDQEVIRSCWKPSEGTRMPPSTSLLQDGXRAIEP

SEQ ID NO: 708 - protein, 234 aa, Homo sapiens
LIVNLALVDLGLALTLPFWAAESALDFHWPFGGALCKMVLTATVLNVYASIFLITALSVARYWVVAMAAGPGTHLSLFWARIATLAVWAAAALVTVPTAVFGVEGEVCGVRLCLLRFPSRYWLGAYQLQRVVLAFMVPLGVITTSYLLLLAFLQRQQRRRQDSRVVARSVRILVASFFLCWFPNHVVTLWGVLVKFDLVPWNSTFYTIQTYVFPVTTCLAHSNSCLNPIVYVLS

SEQ ID NO: 709 - protein, 132 aa, Homo sapiens
LCAFTVLHTVIWPQGLWQTVELAWRIRLYTVLTGKTAVIRRVPVLTGDNRFTVATGTSSIRRSSDIHRTVTFRHGDAPPPQKSFGKSTINRARGGITVSLIIRRQFAAQVLAHGLANGFSIQFLAKQVMQFG

SEQ ID NO: 710 - protein, 252 aa, Homo sapiens
KTMNKKIHSLALLVNLGIYGVAQAQEPTDTPVSHDDTIVVTAAEQNLQAPGVSTITADEIRKNPVARDVSKIIRTMPGVNLTGNSTSGQRGNNRQIDIRGMGPENTLILIDGKPVSSRNSVRQGWRGERDTRGDTSWVPPEMIERIEVLRGPAAARYGNGAAGGVVNIITKKGSGEWHGSWDAYFNAPEHKEEGATKRTNFSLTGPLGDEFSFRLYGNLDKTQADAWDINQGHQSARAGTYATTLPAGREGA

SEQ ID NO: 711 - protein, 102 aa, Homo sapiens
  SITE (100): Xaa equals any of the naturally occurring L-amino acids
  SITE (101): Xaa equals any of the naturally occurring L-amino acids
KLYDSLLALDGHIQSARALMVVAVLLGFVAMVLSVVGMKCTRVGDSNPIAKGRVAIAGGALFILAGLCTLTAVSWYATLVTHEFFNPSTPVNARYEFGPXXV

SEQ ID NO: 712 - protein, 197 aa, Homo sapiens
EGPGKENTKTEVTVFYHLTSKVTPYHFCCLLVIRSVLVTLWIIDRLGRKKTMALCFVIFSFCSLLLFICVGRNVLTLLLFIARAFISGGFQAAYVYTPEVYPTATRALGLGTCSGMARVGALITPFIAQVMLESSVYLTLAVYSGCCLLAALASCFLPIETKGRGLQESSHREWGQEMVGRGMHGAGVTRSNSGSQE

SEQ ID NO: 713 - protein, 182 aa, Homo sapiens
  SITE (122): Xaa equals any of the naturally occurring L-amino acids
  SITE (138): Xaa equals any of the naturally occurring L-amino acids
EHPGQELEIELFDEDPDKDDFLGSLMIDLIEVEKERLLDEWFTLDEVPKGKLHLRLEWLTLMPNASNLDKVLTDIKADKDQANDGLSSALLILYLDSARNLPVGNTVVTPVGAYFLAAALAXNHCFVQHSASPVLFLXCFHFTSKCRRVAVEREKLVFALGVHTFLFTHLAGFVQYIGKEDE

SEQ ID NO: 714 - protein, 92 aa, Homo sapiens
PDATLIFEIELYAVTKGPRSIETFKQIDMDNDRQLSKAEINLYLQREFEKDEKPRDKSYQDAVLEDIFKKNDHDGDGFISPKEYNVYQHDEL

SEQ ID NO: 715 - protein, 201 aa, Homo sapiens
  SITE (157): Xaa equals any of the naturally occurring L-amino acids
DPRVRPRVRPARPGRLLPLLARPAALTALLLLLLGHGGGGRWGARAQEAAAAAADGPPAADGEDGQDPHSKHLYTADMFTHGIQSAAHFVMFFAPWCGHCQRLQPTWNDLGDKYNSMEDAKVYVAKVDCTAHSDVCSAQGVRGYPTLKLFKPGQEAXKYQGPRDFQTLENWMLQTLNEEPVTQSRKWNRPVPPRVQARVVL

SEQ ID NO: 716 - protein, 260 aa, Homo sapiens
STHASALRNEMEKYERIRVVGRGAFGIVHLCLRKADQKLVIIKQIPVEQMTKEERQAAQNECQVLKLLNHPNVIEYYENFLEDKALMIAMEYAPGGTLAEFIQKRCNSLLEEETILHFFVQILLALHHVHTHLILHRDLKTQNILLDKHRMVVKIGDFGISKILSSKSKAYTVPGHGRDLQGTRSLEGQDLTLPPPLPLKNPWPFGPCLGGSAGGSPLACFEKKLSPNGLMHRAPGLPSLQGCDPSFYPAGGGYPMLYLP

SEQ ID NO: 717 - protein, 236 aa, Homo sapiens
RPTRPATQLPGGPGTSCLPSTQSGADLPWSFSGATSKVRALVRLACRMAGQPGHMPHGGSSNNLCHTLGPVHPPDPQRHPNTLSFRCSLADFQIEKKIGRGQFSEVYKATCLLDRKTVALKKVQIFEMMDAKARQDCVKEIGLLKQLNHPNIIKYLDSFIEDNELNIVLELADAGDLSQMIKYFKKQKRLIPERTVWKYFVQLCSAVDHMHSRRVMAPRHQACQRVHHSHGRREAR

SEQ ID NO: 718 - protein, 109 aa, Homo sapiens
HEVFDLLSDMHGTLTFVLIPSQQIKPPPAKETVIHVKAHFDYDPSDDPYVPCRELGLSFQKGDILHVISQEDPNWWQAYREGDEDNQPLAGLVPGKTQYGRKYIILKEH

SEQ ID NO: 719 - protein, 187 aa, Homo sapiens
WNSGCQLVALNFQTPGYEMDLNAGRFLVNGQCGYVLKPACLRQPDSTFDPEYPGPPRTTLSIQVLTAQQLPKLNAEKPHSIVDPLVRIEIHGVPADCARQETDYVLNNGFNPRWGQTLQFQLRAPELALVRFVVEDYDATSPNDFVGQFTLPLSSLKQGYRHIHLLSKDGASLSPATLFIQIRIQRS

SEQ ID NO: 720 - protein, 163 aa, Homo sapiens
REQKLELHRGGGRSRTSGSPGLQEFGTRFYSHCFWAEGAGKEPRGHLTWSLSTGLGCVTLSFLISLYYNTIVAWVLWYLLNSFQHPLPWSSCPPDLNRTGELGAACCVGPCTAERGMCCSVSSIRAAAGGGCSPRGEGRGTGCSVCTCTRLGLPRSTRAVQFL

SEQ ID NO: 721 - protein, 260 aa, Homo sapiens
EDRPERESHAKADSAVSQEQLRKLQERVERCAKEAEKTKAQYEQTLAELHRYTPRYMEDMEQAFETCQAAERQRLLFFKDMLLTLHQHLDLSSSEKFHELHRDLHQGIEAASDEEDLRWWRSTHGPGMAMNWPQFEEWSLDTQRTISRKEKGGRSPDEVTLTSIVPTRDGTAPPPQSPGSPGTGQDEEWSDEESPRKAATGVRVRALYDYAGQEADELSFRAGEELLKMSEEDEQGWCQGQLQSGRIGLYPANYVECVGA

SEQ ID NO: 722 - protein, 160 aa, Homo sapiens
  SITE (126): Xaa equals any of the naturally occurring L-amino acids
  SITE (132): Xaa equals any of the naturally occurring L-amino acids
  SITE (156): Xaa equals any of the naturally occurring L-amino acids
EHPFLVNLWYSFQDEEDMFMVVDLLLGGDLRYHLQQNVHFTEGTVKLYICELALALEYLQRYHIIHRDIKPDNILLDEHGHVHITDFNIATVVKGAERASSMAGTKPYMAPEVFQVYMDRGPGYSXPVDWWXLGITAYELLRRWRPYEIHSVTPIXEILN

SEQ ID NO: 723 - protein, 541 aa, Homo sapiens
MNAAKRLCRRYSQKLTQHTACQLLRTYPAATRIDSSNPNPLMFWLHGIQLVALNYQTDDLPLHLNAAMFEANGGCGYVLKPPVLWDKNCPMYQKFSPLERDLDSMDPAVYSLTIVSGQNVCPSNSMGSPCIEVDVLGMPLDSCHFRTKPIHRNTLNPMWNEQFLFHVHFEDLVFLRFAVVENNSSAVTAQRIIPLKALKRGYRHLQLRNLHNEVLEISSLFINSRRMEENSSGNTMSASSMFNTEERKCLQTHRVTVHGVPGPEPFTVFTINGGTKAKQLLQQILTNEQDIKPVTTDYFLMEEKYFISKEKNECRKQPFQRAIGPEEEIMQILSSWFPEEGYMGRIVLKTQQENLEEKNIVQDDKEVILSSEEESFFVQVHDVSPEQPRTVIKAPRVSTAQDVIQQTLCKAKYSYSILSNPNPSDYVLLEEVVKDTTNKKTTTPKSSQRVLLDQECVFQAQSKWKGAGKFILKLKEQVQASREDKKKGISFASELKKLTKSTKQPRGLTSPSQLLTSESIQTKEEKPVGGLSSSDTMDYRQ

SEQ ID NO: 724 - protein, 237 aa, Homo sapiens
AMLQATCGTPIYMAPEVISAHDYSQQCDIWSIGVVMYMLLRGEPPFLASSEEKLFELIRKGELHFENAVWNSISDCAKSVLKQLMKVDPAHRITAKELLDNQWLTGNKLSSVRPTNVLEMMKEWKNNPESVEENTTEEKNKPSTEEKLKSYQPWGNVPDANYTSDEEEEKQSTAYEKQFPATSKDNFDMCSSSFTSSKLLPAEIKGEMEKTPVTPSQGTATKYPAKSGALSRTKKKL

SEQ ID NO: 725 - protein, 204 aa, Homo sapiens
  SITE (197): Xaa equals any of the naturally occurring L-amino acids
LFRPDTDQQMGAVFVAPEVVGRQRYGRPVDCWAIGVIMYILLSGNPPFYEEVEEDDYENHDKNLFRKILAGDYEFDSPYWDDISQAAKDLVTRLMEVEQDQRITAEEAISHEWISGNAASDKNIKDGVCAQIEKNFARAKWKKAVRVTTLMKRLRAPEQSSTAAAQSASATDTATPGAAGGATAAAASGATSAPEGXAARAAKE

SEQ ID NO: 726 - protein, 181 aa, Homo sapiens
  SITE (1): Xaa equals any of the naturally occurring L-amino acids
  SITE (5): Xaa equals any of the naturally occurring L-amino acids
  SITE (10): Xaa equals any of the naturally occurring L-amino acids
  SITE (15): Xaa equals any of the naturally occurring L-amino acids
  SITE (17): Xaa equals any of the naturally occurring L-amino acids
  SITE (52): Xaa equals any of the naturally occurring L-amino acids
XWGNXNFGGXPPFPXPXAHAATPSNSSKSSRGQAPGGRGLGGGDRKHPREGXLGVSPLGLGHLPGHHHLGGWPARRPEWLWRAMPCSEAPSPSGICPSFRMWRRNEVALKARFQCVRAKFFRICSLTEPKMSLSKAVSPEIQRCRKACWQVNLFWGSRSRRCRMKSLADSEMSSQKGESNS

SEQ ID NO: 727 - protein, 324 aa, Homo sapiens
SNCSGVEGDVTDEDEGAEMSQRMGKENMEQPNNVPVKRFQLCKELSELVSICKSVQFKEFQVSFQVQKYWEVCSFNEVLASKYANENPGDFVNYNKRFLARVFPSPMRIDSSNMNPQDFWKCGCQIVAMNFQTPGLMMDLNIGWFRQNGNCGYVLRPAIMREEVSFFSANTKDSVPGVSPQLLHIKIISGQNFPKPKGSGAKGDVVDPYVYVEIHGIPADCAEQRTKTVHQNGDAPIFDESFEFQINLPELAMVRFVVLDDDYIGDEFIGQYTIPFECLQTGYRHVPLQSLTGEVLAHASLFVHVAITNRRGGGEAFIKGGLSC

SEQ ID NO: 728 - protein, 158 aa, Homo sapiens
  SITE (139): Xaa equals any of the naturally occurring L-amino acids
LQVISGQQLPKVDKTKEGSIVDPLVKVQIFGVRLDTARQETNYVENNGFNPYWGQTLCFRVLVPELAMLRFVVMDYDWKSRNDFIGQYTLPWTCMQQGEPAPLTPGQYPSSGCLPNAVLLPLPGYRHIHLLSKDGISLXPASIFVYICIQEGLEGDES

SEQ ID NO: 729 - protein, 399 aa, Homo sapiens
  SITE (206): Xaa equals any of the naturally occurring L-amino acids
  SITE (378): Xaa equals any of the naturally occurring L-amino acids
  SITE (394): Xaa equals any of the naturally occurring L-amino acids
IKMDESALLDLLECPVCLERLDASAKVLPCQHTFCKRCLLGIVGSRNELRCPECRTLVGSGVEELPSNILLVRLLDGIKQRPWKPGPGGGSGTNCTNALRSQSSTVANCSSKDLQSSQGGQQPRVQSWSPPVRGIPQLPCAKALYNYEGKEPGDLKFSKGDIIILRRQVDENWYHGEVNGIHGFFPTNFVQIIKPLPQPPPQCKAXYDFEVKDKEADKDCLPFAKDDVLTVIRRVDENWAEGMLADKIGIFPISYVEFNSAAKQLIEWDKPPVPGVDAGECSSAAAQSSTAPKHSDTKKNTKKRHSFTSLTMANKSSQASQNRHSMEISPPVLISISRASAPLACAAAAPLTSPSITSASLEAEPSGRIVTVLPGLPXSPDSASSACGNSSATXPDKDR

SEQ ID NO: 730 - protein, 281 aa, Homo sapiens
PIPSQPPLCLPSTEALFGQPPFASRSFSELEEKIRSNRVIELPLRPLLSRDCRDLLQRLLERDPSRRISFQDFFAHPWVDLEHMPSGESLGRATALVVQAVKKDQEGDSAAALSLYCKALDFFVPALHYEVDAQRKEAIKAKVGQYVSRAEELKAIVSSSNQALLRQGTSARDLLREMARDKPRLLAALEVASAAMAKEEAAGGEQDALDLYQHSLGELLLLLAAEPPGRRRELLHTEVQNLMARAEYLKEQVKMRESRWEADTLDKEGLSESVRSSCTLQ

SEQ ID NO: 731 - protein, 166 aa, Homo sapiens
  SITE (142): Xaa equals any of the naturally occurring L-amino acids
  SITE (150): Xaa equals any of the naturally occurring L-amino acids
  SITE (157): Xaa equals any of the naturally occurring L-amino acids
PIPSQPPLCLPSTEALFGQPPFASRSFSELEEKIRSNRVIELPLRPLLSRDCRDLLQRLLERDPSRRISFQDFFAHPWVDLEHMPSGESLGRATALVVQAVKKDQEGDSAAALSLYCKLWTSLYLPCTMKWMPSGRRQLRQXWGSTCPGXRSSRPSXSCFNQALLR

SEQ ID NO: 732 - protein, 337 aa, Homo sapiens
HASALPLPEDPGTLSAERRCLTQPVEDQGVSTQLLAPSGSVCFSYTGTPWKLFLRKEVFYPRENFSHPYYLRLLCEQILRDTFSESCIRISQNERRKMKDLLGGLEVDLDSLTTTEDSVKKRIVVAARDNWANYFSRFFPVSGESGSDVQLLAVSHRGLRLLKVTQGPGLRPDQLKILCSYSFAEVLGVECRGGSTLELSLKSEQLVLHTARARAIEALVELFLNELKKDSGYVIALRSYITDNCSLLSFHRGDLIKLLPVATLEPGWQFGSAGGRSGLFPADIVQPAAAPDFSFSKEQRSGWHKGQLSNGEPGLARWDRASEVRKMGEGQAEARPA

SEQ ID NO: 733 - protein, 104 aa, Homo sapiens
  SITE (49): Xaa equals any of the naturally occurring L-amino acids
  SITE (61): Xaa equals any of the naturally occurring L-amino acids
KTLGKGQTGLVKLGVHCITGQKVAIKIVNREKLSESVLMKVEREIAILXLIEHPHVLKLHXVYENKKYLYLVLEHVSGGELFDYLVLPHDLLYGFPLRRILVSR

SEQ ID NO: 734 - protein, 121 aa, Homo sapiens
  SITE (75): Xaa equals any of the naturally occurring L-amino acids
  SITE (98): Xaa equals any of the naturally occurring L-amino acids
AIVEFDYQAQHDDELTISVGEIITNIRKEDGGWWEGQINGRRGLFPDNFVREIKKEMKKDPLTNKAPEKPLHEVXSGNSLLSSETILRTNKRGERRRXRCQVAFSYLPQNDDELELKLATS

SEQ ID NO: 735 - protein, 219 aa, Homo sapiens
PRVRDSPSPEEDKEEHISLAHRGVDASKKTSKTVTISQVSDNFVREIKKEMKKDPLTNKAPEKPLHEVPSGNSLLSSETILRTNKRGERRRRRCQVAFSYLPQNDDELELKVGDIIEVVGEVEEGWWEGVLNGKTGMFPSNFIKELSGESDELGISQDEQLSKSSLRETTGSESDGGDSSSTKSEGANGTVATAAIQPKKVKGVGFGDIFKDKPIKLRP

SEQ ID NO: 736 - protein, 124 aa, Homo sapiens
LQSSGELLHITDMKGTGIMDCAPKALLARALYDNCPDCSDELAFSRGDILTILEQHVPESEGWWKCLLHGRQGLAPANRLQILTEVAADRPCPPFLRGLEEAPASSEETYQVPTLPRLHSRPRL

SEQ ID NO: 737 - protein, 92 aa, Homo sapiens
FRLPSSNRTISKENHQNLRKHHHNRNYPVSFQTCEINSKHSSQIKCEMFYSFLFFFKRLGHALLLRLEYSGMIVAHCSLELLGSSNPPASAF

SEQ ID NO: 738 - protein, 156 aa, Homo sapiens
  SITE (98): Xaa equals any of the naturally occurring L-amino acids
  SITE (99): Xaa equals any of the naturally occurring L-amino acids
  SITE (108): Xaa equals any of the naturally occurring L-amino acids
EPRPTYFISSTVGKRCPEAADAGDTRKWTLVGHELLNTEAPLKLVNPLKHGIVVDWDCVQDIWEYIFRTAMKILPEEHAVLVSDPPLSPSSNREKYAXXMFETFGIPXMHVTSQSLLSIYSYGKTSGLVVESGHGVSHVVPISEGDVLPGLTSRAD

SEQ ID NO: 739 - protein, 356 aa, Homo sapiens
EGKAAGMFNPHALDSPAVIFDNGSGFCKAGLSGEFGPRHMVSSIVGHLKFQAPSAEANQKKYFVGEEALYKQEALQLHSPFERGLITGWDDVERLWKHLFEWELGVKPSDQPLLATEPSLNPRENREKMAEVMFENFGVPAFYLSDQAVLALYASACVTGLVVDSGDAVTCTVPIFEGYSLPHAVTKLHVAGRDITELLMQLLLASGHTFPCQLDKGLVDDIKKKLCYVALEPEKELSRRPEEVLREYKLPDGNIISLGDPLTRRPRPCSCPSSWAARAPGSRIWAPAASPSVIPTSRRSSLGRLCCRGALPCSTGWMTGFSRSWSSWPPRTPPSRSRLPPTGGSPPGLEPPSSPL

SEQ ID NO: 740 - protein, 353 aa, Homo sapiens
  SITE (2): Xaa equals any of the naturally occurring L-amino acids
  SITE (8): Xaa equals any of the naturally occurring L-amino acids
  SITE (21): Xaa equals any of the naturally occurring L-amino acids
  SITE (24): Xaa equals any of the naturally occurring L-amino acids
VXLGRPAXPTPWPPSWAASPXKPXTSGQSGLQTFIGEAARVLPELTLVQPLRSGIVVDWDAAELIWRHLLEHDLRVATHDHPLLFSDPPFSPATNREKLVEVAFESLRSPAMYVASQSVLSVYAHGRVSGLVVDTGHGVTYTVPVFQGYNLLHATERLDLAGNHLTAFLAEMLLQAGLPLGQQDLDLVENIKHHYCYVAFDFQKEQARPEQEYKRTLKLPDGRTVTLGKELFQCPELLFNPPEVPGLSPVGLSTMAKQSLRKLSLEMRADLAQNVLLCGGSSLFTGFEGRFRAELLRALPAETHVVVAAQPTRNFSVWIGGSILASLRAFQSCWVLREQYEEQGPYIVYRKCY

SEQ ID NO: 741 - protein, 373 aa, Homo sapiens
  SITE (229): Xaa equals any of the naturally occurring L-amino acids
GTSHCQLPVVIDNGSGMIKAGVAGCREPQFIYPNIIGRAKGQSRAAQGGLELCVGDQAQDWRSSLFISYPVERGLITSWEDMEIMWKHIYDYNLKLKPCDGPVLITEPALNPLANRQQITEMFFEHLGVPAFYMSIQAVLALFAAGFTTGLVLNSGAGVTQSVPIFEGYCLPHGVQQLDLAGLDLTNYLMVLMKNHGIMLLSASDRKIVEDIKESFCYVAMNYEEEMAXKPDCLEKVYQLPDGKVIQLHDQLFSCPEALFSPCHMNLEAPGIDKICFSSIMKCDTGLRNSFFSNIILAGGSTSFPGLDKRLVKDIAKVAPANTAVQVIAPPERKISVWMGGSILASLSAFQDMWITAAEFKEVGPNIVHQRCF

SEQ ID NO: 742 - protein, 446 aa, Homo sapiens
  SITE (434): Xaa equals any of the naturally occurring L-amino acids
ELSKSGAALDNMWAPPAAIMGDGPTKKVGNQAPLQTQALQTASLRDGPAKRAVWVRHTSSEPQEPTESKAAKERPKQEVTKAVVVDLGTGYCKCGFAGLPRPTHKISTTVGKPYMETAKTGDNRKETFVGQELNNTNVHLKLVNPLRHGIIVDWDTVQDIWEYLFRQEMKIAPEEHAVLVSDPPLSPHTNREKYAEMLFEAFNTPAMHIAYQSRLSMYSYGRTSGLVVEVGHGVSYVVPIYEGYPLPSITGRLDYAGSDLTAYLLGLLNSAGNEFTQDQMGIVEDIKKKCCFVALDPIEEKKVPLSEHTIRYVLPDGKEIQLCQERFLCSEMFFKPSLIKSMQLGLHTQTVSCLNKCDIALKRDLMGNILLCGGSTMLSGFPNRLQKELSSMCPNDTPQVNVLPERDSAVWTGGSILASLQGFQPLWVHRFEYXEHGPFFLYRRCF

SEQ ID NO: 743 - protein, 124 aa, Homo sapiens
  SITE (76): Xaa equals any of the naturally occurring L-amino acids
  SITE (124): Xaa equals any of the naturally occurring L-amino acids
DRGREVSGRLSRVARRSGAFSPAAGPSPKVASVSGSRRVHRPSSLGRIAVVVDQGSGFTKAGFAGENQPRIVLKSXSLVPSWDRPVLPGAPGCELAGAWRGRTPSSTAWWRTGRRWKGCGSACX

SEQ ID NO: 744 - protein, 105 aa, Homo sapiens
PGEKILLFKRALGVTTGILPWNFPFFLIARKMAPALLTGNTIVIKPSEFTPNNAIAFAKIVDEIGLPRGVFNLVLGRGETVGQELAGNPKVRNGQYDRQRSLQVR

SEQ ID NO: 745 - protein, 169 aa, Homo sapiens
  SITE (58): Xaa equals any of the naturally occurring L-amino acids
  SITE (61): Xaa equals any of the naturally occurring L-amino acids
  SITE (63): Xaa equals any of the naturally occurring L-amino acids
  SITE (84): Xaa equals any of the naturally occurring L-amino acids
  SITE (123): Xaa equals any of the naturally occurring L-amino acids
  SITE (158): Xaa equals any of the naturally occurring L-amino acids
HTMFLLQLRKSFLHSDLKKQYQDMLDVLANAGRKQTVAFAMKQVSSKMKSTQNSPHSXLLXCXDPSPTASKPSPSAQKCPGSYXVSLGTLSKSSRALFLLPPRMVSISHWINLWFSSLVFFCXTWISLRRKVPSWLQLLLFCLLFFGGVVGDGVLLLXPRPECCGAIGI

SEQ ID NO: 746 - protein, 496 aa, Homo sapiens
MQRDHTMDYKESCPSVSIPSSDEHREKKKRFTVYKVLVSVGRSEWFVFRRYAEFDKLYNTLKKQFPAMALKIPAKRIFGDNFDPDFIKQRRAGLNEFIQNLVRYPELYNHPDVRAFLQMDSPKHQSDPSEDEDERSSQKLHSTSQNINLGPSGNPHAKPTDFDFLKVIGKGSFGKVLLAKRKLDGKFYAVKVLQKKIVLNRKEQKHIMAERNVLLKNVKHPFLVGLHYSFQTTEKLYFVLDFVNGGELFFHLQRERSFPEHRARFYAAEIASALGYLHSIKIVYRDLKPENILLDSVGHVVLTDFGLCKEGIAISDTTTTFCGTPEYLAPEVIRKQPYDNTVDWWCLGAVLYEMLYGLPPFYCRDVAEMYDNILHKPLSLRPGVSLTAWSILEELLEKDRQNRLGAKEDFLEIQNHPFFESLSWADLVQKKIPPPFNPNVAGPDDIRNFDTAFTEETVPYSVCVSSDYSIVNASVLEADDAFVGFSYAPPSEDLFL

SEQ ID NO: 747 - protein, 450 aa, Homo sapiens
  SITE (249): Xaa equals any of the naturally occurring L-amino acids
  SITE (297): Xaa equals any of the naturally occurring L-amino acids
DDTLIVLAEEHGCLDIIKELPETVIDLLNKCLTFHPSKRPTPDELMKDKVFSEVSPLYTPFTKPASLFSSSLRCADLTLPEDISQLCKDINNDYLAERSIEEVYYLWCLAGGDLEKELVNKEIIRSKPPICTLPNFLFEDGESFGQGRDRSSLLDDTTVTLSLCQLRNRLKDVGGEAFYPLLEDDQSNLPHSNSNNELSAAATLPLIIREKDTEYQLNRIILFDRLLKAYPYKKNQIWKEARVDIPPLXRGLTWAALLGVEGAIHAKYDAIDKDTPIPTDRQIEVDIPRCHQYDELXSSPEGHAKFRRVLKAWVVSHPDLVYWQGLDSLCAPFLYLNFNNEALAYACMSAFIPKYLYNFFLKDNSHVIQEYLTVFSQMIAFHDPELSNHLNEIGFIPDLYAIPWFLTMFTHVFPLHKIFHLWDTLLLGNSSFPFCIGVGNSSAAAGPAFG

SEQ ID NO: 748 - protein, 105 aa, Homo sapiens
SDCRGREEEPTGYIRFEKFLPVMTEILLERKYRPIPEDVLLRAFEVLDSAKRGFLTKDELIKYMTEEGEPFSQEEMEEMLSAAIDPESNSINYKDYITMMVIDEN

SEQ ID NO: 749 - protein, 581 aa, Homo sapiens
GRVGGCAAERSCEGVAVIRGPGTRAGAEAQAAGRGVGSAGLSVPSSMSEGESQTVLSSGSDPKVESSSSAPGLTSVSPPVTSTTSAASPEEEEESEDESEILEESPCGRWQKRREEVNQRNVPGIDSAYLAMDTEEGVEVVWNEVQFSERKNYKLQEEKVRAVFDNLIQLEHLNIVKFHKYWADIKENKARVIFITEYMSSGSLKQFLKKTKKNHKTMNEKAWKRWCTQILSALSYLHSCDPPIIHGNLTCDTIFIQHNGLIKIGSVAPDTINNHVKTCREEQKNLHFFAPEYGEVTNVTTAVDIYSFGMCALEMAVLEIQGNGESSYVPQEAISSAIQLLEDPLQREFIQKCLQSEPARRPTARELLFHPALFEVPSLKLLAAHCIVGHQHMIPENALEEITKNMDTSAVLAEIPAGPGREPVQTLYSQSPALELDKFLEDVRNGIYPLTAFGLPRPQQPQQEEVTSPVVPPSVKTPTPEPAEVETRKVVLMQCNIESVEEGVKHHLTLLLKLEDKLNRHLSCDLMPNENIPELAAELVQLGFISEADQSRLTSLLEETLNKFNFARNSTLNSAAVTVSS

SEQ ID NO: 750 - protein, 302 aa, Homo sapiens
  SITE (292): Xaa equals any of the naturally occurring L-amino acids
  SITE (294): Xaa equals any of the naturally occurring L-amino acids
  SITE (295): Xaa equals any of the naturally occurring L-amino acids
  SITE (296): Xaa equals any of the naturally occurring L-amino acids
  SITE (300): Xaa equals any of the naturally occurring L-amino acids
GRVGGCAAERSCEGVAVIRGPGTRAGAEAQAAGRGVGSAGLSVPSSMSEGESQTVLSSGSDPKVESSSSAPGLTSVSPPVTSTTSAASPEEEEESEDESEILEESPCGRWQKRREEVNQRNVPGIDSAYLAMDTEEGVEVVWNEVQFSERKNYKLQEEKVRAVFDNLIQLEHLNIVKFHKYWADIKENKARVIFITEYMSSGSLKQFLKKTKKNHKTMNEKAWKRWCTQILSALSYLHSCDPPIIHGNLTCDTIFIQHNGLIKIGSVALIVGVSPYSQWLLDTINNHVKTCXEXXXNLHXFA

SEQ ID NO: 751 - protein, 178 aa, Homo sapiens
RHGYCKVERRRNTVMIDYVLPDFSTIKKGFCKPREEMVLSGKYKSGEQILRLANERFAVPEILFNPSDIGIQEMGIPEAIVYSIQNLPEEMQPHFFKNIVLTGGNSLFPGFRDRVYSEVRCLTPTDYDVSVVLPENPITYAWEGGKLISENDDFEDMVVTREDYEENGHSVCEEKFDI

SEQ ID NO: 752 - protein, 453 aa, Homo sapiens
  SITE (61): Xaa equals any of the naturally occurring L-amino acids
LYVNPLDCYNIHWPIRRGQLNIHPGPGGSLTAVLADIEVIWSHAIQKYLEIPLKDLKYYRXILLIPDIYNKQHVKELVNMILMKMGFSGIVVHQESVCATYGSGLSSTCIVDVGDQKTSVCCVEDGVSHRNTRLCLAYGGSDVSRCFYWLMQRAGFPYRECQLTNKMDCLLLQHLKETFCHLDQDISGLQDHEFQIRHPDSPALLYQFRLGDEKLQAPMALFYPATFGIVGQKMTTLQHRSQGDPEDPHDEHYLLATQSKQEQSAKATADRKSASKPIGFEGDLRGQSSDLPERLHSQEVDLGSAQGDGLMAGNDSEEALTALMSRKTAISLFEGKALGLDKAILHSIDCCSSDDTKKKMYSSILVVGGGLMFHKAQEFLQHRILNKMPPSFRRIIENVDVITRPKDMDPRLIAWKGGAVLACLDTTQELWIYQREWQRFGVRMLRERAAFVW

SEQ ID NO: 753 - protein, 172 aa, Homo sapiens
GTERGSGSSKPTGSSRGPRMAKFLSQDQINEYKECFSLYDKQQRGKIKATDLMVAMRCLGASPTPGEVQRHLQTHGIDGNGELDFSTFLTIMHMQIKQEDPKKEILLAMLMVDKEKKGYVMASDLRSKLTSLGEKLTHKEVDDLFREADIEPNGKVKYDEFIHKITLPGRDY

SEQ ID NO: 754 - protein, 278 aa, Homo sapiens
GPDGIPAESQERERRPLPGVQGSREETLAFVPLLRLLEAETLSPGRAFCSPISSKIQPAQVAGHELCSGSWNLTLVASGPVSMAAEHLLPGPPPSLADFRLEAGGKGTERGSGNSKPTGSSRGPRMAKFLSQDQINEYKECFSLYDKQQRGKIKATDLMVAMRCLGASPTPGEVQRHLQTHGIDGNGELDFSTFLTIMHMQIKQEDPKKEILLAMLMVDKEKKGYVMASDLRSKLTSLGEKLTHKEVDDLFREADIEPNGKVKYDEFIHKITLPGRDY

SEQ ID NO: 755 - protein, 270 aa, Homo sapiens
HDYPLRSRLMLEQMGIAAKQASYKLAQLSSREKNRVLEKIADELEAQSEIILNANAQDVADARANGLSEAMLDRLALTPARLKGIADDVRQVCNLADPVGQVIDGGVLDSGLRLERRRVPLGVIGVIYEARPNVTVDVASLCLKTGNAVILRGGKETCRTNAATVAVIQDALKSCGLPAGAVQAIDNPDRALVSEMLRMDKYIDMLIPRGGAGLHKLCREQSTIPVITGGIGVCHIYVDESVEIAEALKVIVNAKTQRPSNIRYFYVIIL

SEQ ID NO: 756 - protein, 234 aa, Homo sapiens
TRECHQLAYADEAKKRSNPYVKTYLLPDKSRQGKRKTSIKRDTVNPLYDETLRYEIPESLLAQRTLQFSVWHHGRFGRNTFLGEAEIQMDSWKLDKKLDHCLPLHGKISAESPTGLPSHKGELVVSLKYIPASKTPVGGDRKKSKGGEGGELQVWIKEAKNLTAAKAGGTSDSFVKGYLLPMRNKASKRKTPVMKKTLNPHYNHTFVYNGVRLEDLQHMCLELTVWDPGAPGQQ

SEQ ID NO: 757 - protein, 131 aa, Homo sapiens
HELTRTPPFSPALPPARGVPGSAVLLFEVELVSREDGLPTGYLFVWHKDPPANLFEDMDLNKDGEVPPEEFSTFIKAQVSEGKGRLMPGQDPEKTIGDMFQNQDRNQDGKITVDELKLKSDEDEERVHEEL

SEQ ID NO: 758 - protein, 182 aa, Homo sapiens
VWGFQTHDVLPDIVTMAKGIGNGFPMAAVITTPEIAKSLAKCLQHFNTFGGNPMACAIGSAVLEVIKEENLQENSQEVGTYMLLKFAKLRDEFEIVGDVRGKGLMIGIEMVQDKISCRPLPREEVNQIHEDCKHMGLLVGRGSIFSQTFRIAPSMCITKPEVDFAVEVFRSALTQHMERRAK

SEQ ID NO: 759 - protein, 103 aa, Homo sapiens
  SITE (13): Xaa equals any of the naturally occurring L-amino acids
  SITE (88): Xaa equals any of the naturally occurring L-amino acids
  SITE (95): Xaa equals any of the naturally occurring L-amino acids
PSWDPKSTALQGXWEHQPGAFSNPNAQPTDFDFLKVIGKGNYGKVLLAKRKSDGAFYAVKVLQKKVHLKEERSRTPSWQNAMLLLKKXRDPFLLXAALLLPKT

SEQ ID NO: 760 - protein, 124 aa, Homo sapiens
ITRNTRNKGACSSRRSVSPWRTEFIICVLSLGSLAFADACTSSSVTPKMFVHFLSKNHMISLVGCMIQFYIFASGANTGSFLLVVMAYDCYMAICNPLLYPLVMSNTFCIQLSGVSFIIVFFIL

SEQ ID NO: 761 - protein, 209 aa, Homo sapiens
ALIRLTIGKAGTPAGTGPEFPGRPTRPAQIYSVAIFLGINLAAFIIIVFSYGSMFYSVHQSAITATEIRNQVKKEMILAKRFFFIVFTDALCWIPIFVVKFLSLLQVEIPGTITSWVVIFILPINSALNPILYTLTTRPFKEMIHRFWYNYRQRKSMDSKGQKTYAPSFIWVEMWPLQEMPPELMKPDLFTYPCEMSLISQSTRLNSYS

SEQ ID NO: 762 - protein, 539 aa, Homo sapiens
GRPTRPERMLHVVDGKVPDTLRKCFSEGEKVNYEKFRNWLFLNKDAFTFSRWLLSGGVYVTLTDDSDTPTFYQTLAGVTHLEESDIIDLEKRYWLLKAQSRTGRFDLETFGPLVSPPIRPSLSEGLFNAFDENRDNHIDFKEISCGLSACCRGPLAERQKFCFKVFDVDRDGVLSRVELRDMVVALLEVWKDNRTDDIPELHMDLSDIVEGILNAHDTTKMGHLTLEDYQIWSVKNVLANEFLNLLFQVCHIVLGLRPATPEEEGQIIRGWLERESRYGLQAGHNWFIISMQWWQQWKEYVKYDANPVVIEPSSVLNGGKYSFGTAAHPMEQVEDRIGSSLSYVNTTEEKFSDNISTASEASETAGSGFLYSATPGADVCFARQHNTSDNNNQCLLGANGNILLHLNPQKPGAIDNQPLVTQEPVKATSLTLEGGRLKRTPQLIHGRDYEMVPEPVWRALYHWYGANLALPRPVIKNSKTDIPELELFPRYLLFLRQQPATRTQQSNIWVNMGMMSLRMFPQHLPRGNLRMQQEYHAFP

SEQ ID NO: 763 - protein, 294 aa, Homo sapiens
  SITE (61): Xaa equals any of the naturally occurring L-amino acids
  SITE (164): Xaa equals any of the naturally occurring L-amino acids
  SITE (181): Xaa equals any of the naturally occurring L-amino acids
EIFKICQVLGTPKKSDWPEGYQLASSMNFRFPQCVPINLKTLIPNASNEAIQLMTEMLNWXPKKRPTASQALKHPYFQVGQVLGPSSNHLESKQSLNKQLQPLESKPSLVEVEPKPLPDIIDQVVGQPQPKTSQQPLQPIQPPQNLSVQQPPKQQSQEKPPQTXFPSIVKNMPTKPNGTLXHKSGRRRWGQTIFKSGDSWEELEDYDFGASHSKKPSMGVFKEKRKKDSPFRLPEPVPSGSNHSTGENKSLPAVTSLKSDSELSTAPTSKQYYLKQSRYLPGQHDIILQGLADL

SEQ ID NO: 764 - protein, 803 aa, Homo sapiens
AMAATRAGPRAREIFTSLEYGPVPESHACALAWLDTQDRCLGHYVNGKWLKPEHRNSVPCQDPITGENLASCLQAQAEDVAAAVEAARMAFKGWSAHPGVVRAQHLTRLAEVIQKHQRLLWTLESLVTGRAVREVRDGDVQLAQQLLHYHAIQASTQEEALAGWEPMGVIGLILPPTFSFLEMMWRICPALAVGCTVVALVPPASPAPLLLAQLAGELGPFPGILNVVSGPASLVPILASQPGIRKVAFCGAPEEGRALRRSLAGECAELGLALGTESLLLLTDTADVDSAVEGVVDAAWSDRGPGGLRLLIQESVWDEAMRRLQERMGRLRSGRGLDGAVDMGARGAAACDLVQRFVREAQSQGAQVFQAGDVPSERPFYPPTLVSNLPPASPCAQVEVPWPVVVASPFRTAKEALLVANGTPRGGSASVWSERLGQALELGYGLQVGTVWINAHGLRDPSVPTGGCKESGCSWHGGPDGLYEYLRPSGTPARLSCLSKNLNYDTFGLAVPSTLPAGPEIGPSPAPPYGLFVGGRFQAPGARSSRPIRDSSGNLHGYVAEGGAKDIRGAVEAAHQAFPGWAGQSPGARAALLWALAAALERRKSTLASRLERQGAELKAAEAEVELSARRLRAWGARVQAQGHTLQVAGLRGPVLRLREPLGVLAVVCPDEWPLLAFVSLLAPALAYGNTVVMVPSAACPLLALEVCQDMATVFPAGLANVVTGDRDHLTRCLALHQDVQAMWYFGSAQGSQFVEWASAGNLKPVWASRGCPRAWDQEAEGAGPELGLRVARTKALWLPMGD

SEQ ID NO: 765 - protein, 67 aa, Homo sapiens
SSRVLVWIHADLKPENIMLVDPVRQPYRVKVIDFGSASHVSKAVCSTYLQSRYYRAPEIILGYHFVK

SEQ ID NO: 766 - protein, 221 aa, Homo sapiens
  SITE (202): Xaa equals any of the naturally occurring L-amino acids
  SITE (207): Xaa equals any of the naturally occurring L-amino acids
THASDGCSRRGSVRGAAVGCPAMDPTAGSKKEPGGGAATEEGVNRIAVPKPPSIEEFSIVKPISRGAFGKVYLGQKGGKLYAVKVVKKADMINKNMTHQVQAERDALALSKSPFIVHLYYSLQSANNVYLVMEYLIGGDVKSLLHIYGYFDEEMAVKYISEVALALDYLHRHGIIHRDLKPDNMLISNEGHIKLTDFGLSKXYFELXDINMDGISLQHHQW

SEQ ID NO: 767 - protein, 234 aa, Homo sapiens
ARGFMRVSLLPDEQIVGISRIQRNAYSIFFDEKFSIPLDPTALEEKSLRFSVFGIDEDERNVSTGVVELKLSVLDLPLQPFSGWLYLQDQNKAADAVGEILLSLSYLPTAERLTVVVVKAKNLIWTNDKTTADPFVKVYLLQDGRKMSKKKTAVKRDDPNPVFNEAMIFSVPAIVLQDLSLRVTVAESSSDGRGDNVGHVIIGPSASGMGTTHWNQMLATLRRPVSMWHAVRRN

SEQ ID NO: 768 - protein, 315 aa, Homo sapiens
DPRVRSSVSGSVMSVYSGDFGNLEVKGNIQFAIEYVESLKELHVFVAQCKDLAAADVKKQRSDPYVKAYLLPDKGKMGKKKTLVVKKTLNPVYNEILRYKIEKQILKTQKLNLSIWHRDTFKRNSFLGEVELDLETWDWDNKQNKQLRWYPLKRKTAPVALEAENRGEMKLALQYAPEPAPGKKLPTTGEVHIWVKECLDLPLLRGSHLNSFVKGTILPDTSRKSRQKTRAVGKTTNPIFNHTMVYEGFRPEDLMEACVELTVWDHYKLTNQFLGGLRIGFGTGKSYGTEVDWMDSTSEEVALWEKMVNSPNTWI

SEQ ID NO: 769 - protein, 166 aa, Homo sapiens
LKAMDSNGLSDPYVKFRLGHQKYKSKIMPKTLNPQWREQFDFHLYEERGGVIDITAWDKDAGKRDDFIGRCQVDLSALSREQTHKLELQLEEGEGHLVLLVTLTASATVSISDLSVNSLEDQKEREEILKRYSPLRIFHNLKDVGFLQVKVIRAEGLMAADVTGKR

SEQ ID NO: 770 - protein, 373 aa, Homo sapiens
AGTTAPPREERTGGVGGYPAVGAREDRMSHPSGPYSQASAAAPQPAAARQPPPPEEEEEEANSYDSDEATTLGALEFSLLYDQDNSSLQCTIIKAKGLKPMDSNGLADPYVKLHLLPGASKSNKLRTKTLRNTRNPIWNETLVYHGITDEDMQRKTLRISVCDEDKFGHNEFIGETRFSLKKLKPNQRKNFNICLERVIPMKRAGTTGSARGMALYEEEQVERVGDIEERGKILVSLMYSTQQGGLIVGIIRCVHLAAMDANGYSDPFVKLWLKPDMGKKAKHKTQIKKKTLNPEFNEEFFYDIKHSDLAKKSLDISVWDYDIGKSNDYIGGCQLGISAKGERLKHWYECLKNKDKKIERWHQLQNENHVSSD

SEQ ID NO: 771 - protein, 199 aa, Homo sapiens
GLQEFGTSSGEAGTGAPCGRISFALRYLYGSDQLVVRILQALDLPAKDSNGFSDPYVKIYLLPDRKKKFQTKVHRKTLNPVFNETFQFSVPLAELAQRKLHFSVYDFDRFSRHDLIGQVVLDNLLELAEQPPDRPLWRDIVEGGSEKADLGELNFSLCYLPTAGRLTVTIIKASNLKAMDLTGFSDPYVKASLIRRGGV

SEQ ID NO: 772 - protein, 195 aa, Homo sapiens
ARAEFGTSLVLSFDRFSRDDVIGEVMVPLAGVDPSTGKVQLTRDIIKRNIQKCISRGELQVSLSYQPVAQRMTVVVLKARHLPKMDITGLSGNPYVKVNVYYGRKRIAKKKTHVKKCTLNPIFNESFIYDIPTDLLPDISIEFLVIDFDRTTKNEVVGRLILGAHSVTASGAEHWREVCESPRKPVAKWHSLSEY

SEQ ID NO: 773 - protein, 175 aa, Homo sapiens
AAPRPRPGWWGPSSPTQCWGASGSSAMWTATACWMMRSSRWPATSSRPSWKATGCPPTCPVAWCHPPSDATRAPPDEPAPLPWPCCGSPAPVGCTHTPAPAHTRPACPPCPAVRTGGLPPHYRQTPRWKHLEGTTGGTRLLCPPFTPPASRSLRHITHTLAHAGIHPSVIHSNIY

SEQ ID NO: 774 - protein, 990 aa, Homo sapiens
GRPTRPENLWKENLRKEEEEKQKRLQEEKTQEKIQEEERKAEEKQRETASVLVNYRALYPFEARNHDEMSFNSGDIIQVDEKTVGEPGWLYGSFQGNFGWFPCNYVEKMPSSENEKAVSPKKALLPPTVSLSATSTSSEPLSSNQPASVTDYQNVSFSNLTVNTSWQKKSAFTRTVSPGSVSPIHGQGQVVENLKAQALCSWTAKKDNHLNFSKHDIITVLEQQENWWFGEVHGGRGWFPKSYVKIIPGSEVKREEPEALYAAVNKKPTSAAYSVGEEYIALYPYSSVEPGDLTFTEGEEILVTQKDGEWWTGSIGDRSGIFPSNYVKPKDQESFGSASKSGASNKKPEIAQVTSAYVASGSEQLSLAPGQLILILKKNTSGWWQGELQARGKKRQKGWFPASHVKLLGPSSERATPAFHPVCQVIAMYDYAANNEDELSFSKGQLINVMNKDDPDWWQGEINGVTGLFPSNYVKMTTDSDPSQQWCADLQTLDTMQPIERKRQGYIHELIQTEERYMADLQLVVEVFQKRMAESGFLTEGEMALIFVNWKELIMSNTKLLKALRVRKKTGGEKMPVQMIGDILAAELSHMQAYIRFCSCQLNGAALLQQKTDEDTDFKEFLKKLASDPRCKGMPLSSFLLKPMQRITRYPLLIRSILENTPESHADHSSLKLALERAEELCSQVNEGVREKENSDRLEWIQAHVQCEGLAEQLIFNSLTNCLGPRKLLHSGKLYKTKSNKELHGFLFNDFLLLTYMVKQFAVSSGSEKLFSSKSNAQFKMYKTPIFLNEVLVKLPTDPSSDEPVFHISHIDRVYTLRTDNINERTTWVQKIKAASEQYIDTEKKKREKAYQARSQKTSGIGRLMVHVIEATELKACKPNGKSNPYCEISMGSQSYTTRTIQDTLNPKWNFNCQFFIKDLYQDVLCLTLFDRDQFSPDDFLGRTEIPVAKIRTEQESKGPMTRRLLLHEVPTGEVWVRFDLQLFEQKTLL

SEQ ID NO: 775 - protein, 174 aa, Homo sapiens
  SITE (70): Xaa equals any of the naturally occurring L-amino acids
QSLPPPAGPGTFHFHYQAYLLSCHFPRRPAYGDVTVTSLHPGGSARFHCATGYQLKGARHLTCLNATQPXWDSKEPVCIAACGGVIRNATTGRIVSPGFPGNYSNNLTCHWLLEAPEGQRLHLHFEKVSLAEDDDRLIIRNGDNVEAPPVYDSYEVEYPPPPPPLQPHYHRVSV

SEQ ID NO: 776 - protein, 305 aa, Homo sapiens
PLTGRKCPGWTHSGSRRSPRIAEEVPGFPKRAEASRQFSETADRLELLRRAVMAAARATTPADGEEPAPEAEALAAARERSSRFLSGLELVKQGAEARVFRGRFQGRAAVIKHRFPKGYRHPALEARLGRRRTVQEARALLRCRRAGISAPVVFFVDYASNCLYMEEIEGSVTVRDYIQSTMETEKIPQGLSNLAKTIGQVLARMHDEDLIHGDLTTSNMLLKPPLEQLNIVLIDFGLSFISALPEDKGVDLYVLEKAFLSTHPNTETVFEAFLKSYSTSSKKARPVLKKLDEVRLRGRKRSMVG

SEQ ID NO: 777 - protein, 95 aa, Homo sapiens
AREENELIPSIIRGRATGITGNFANIGGALASLMMILSIYSRPLPWIIYGVFAILSGLVVLLLPETRNQPLLDSIQDVENEGVNSLAAPQRSSVL

SEQ ID NO: 778 - protein, 93 aa, Homo sapiens
  SITE (46): Xaa equals any of the naturally occurring L-amino acids
  SITE (55): Xaa equals any of the naturally occurring L-amino acids
HLMSPKLGFDAFLDPGLYRWNHLCCDTFSFSYCGSREIAHFFCELXPTNPLMHEXQYLKGYFHCSIVMLVSLLHHMFLCWSYLAVITWIWRGG

SEQ ID NO: 779 - protein, 396 aa, Homo sapiens
AGPHNWRGQLLQGEGGHIQEVQGYRGHQGGGPAASAPGLRQQVPAARAVHPAGRATPAHRARLRVHRGVQRETVHRDGSGRHRPAASRAAQRAHPRSSGARPLCADRRRRALPARSSPGAPRPQVRKRAAEPGRAPRQAHRLRLRPPGPWLPRPEHHLLRLSRLRVTRGAPGHPLRPQEVRCVEHGRRALRHGHRVHALRRLGHRRPAPAPETRRALPRRPRAVRALQGPDRRAAAVQPVRQALRGPGSAQLLAARRGLRLEAGWFQPFLQPRALGQGGARARGALRGNMRSCRVLLHMRFFPSASLPFFPRGSPQLPLFGIHVPRDPGSWRRMRIRDSLRPGPERARPEGTEALRLRGTLSLCAEGVPSQPAVGARFPVGTCNKLTVPRKKKKKK

SEQ ID NO: 780 - protein, 121 aa, Homo sapiens
  SITE (76): Xaa equals any of the naturally occurring L-amino acids
  SITE (104): Xaa equals any of the naturally occurring L-amino acids
  SITE (118): Xaa equals any of the naturally occurring L-amino acids
GERRSAVQHGGNPSIHGPRRPFLIPAKASVERPWMYGHCVTLYCFVYGKCPFIDDFILALHRKIKNEPVVFPEEPXISEELKDLILKMLDKNPETRIGVPDIKXHPWVTKNGEEPSSXEDT

SEQ ID NO: 781 - protein, 180 aa, Homo sapiens
  SITE (146): Xaa equals any of the naturally occurring L-amino acids
  SITE (152): Xaa equals any of the naturally occurring L-amino acids
  SITE (164): Xaa equals any of the naturally occurring L-amino acids
  SITE (171): Xaa equals any of the naturally occurring L-amino acids
  SITE (175): Xaa equals any of the naturally occurring L-amino acids
PLTLSMANTTGEPEEVSGALSPPSASAYVKLVLLGLIMCVSLAGNAILSLLVLKERALHKAPYYFLLDLCLADGIRSAVCFPFVLASVRHGSSWTFSALSCKIVAFMAVLFCFHAAFMLFCISVTRYMAIAHHRFYAKRMTLWTCXAASAWXGPCLWPWPFHLXLTWAPTXYSGXGPVHL

SEQ ID NO: 782 - protein, 167 aa, Homo sapiens
QFHTGNSYDHDYASSKLTLTKGNKSWSSTAVAAALELVDPPGCRNSARGNNVMLMPTGIIKLIDFGCARRLAWAGLNGTHSDMLKSMHGTPYWMAPEVINESGYGRKSDIWSIGCTVFEMATGKPPLASMDRMAAMFYIGAHRGLMPPLPDHFSENAADFVRMCLTR

SEQ ID NO: 783 - protein, 434 aa, Homo sapiens
TKQHTRRALNTSCLEEWYVSAIFFILSANILSSPSKRGQKGTLIGYSPEGTPLYNFMGDAFQHSSQSIPRFIKESLKQILEESDSRQIFYFLCLNLLFTFVELFYGVLTNSLGLISDGFHMLFDCSALVMGLFAALMSRWKATRIFSYGYGRIEILSGFINGLFLIVIAFFVFMESVARLIDPPELDTHMLTPVSVGGLIVNLIGICAFSHAHSHAHGASQGSCHSSDHSHSHHMHGHSDHGHGHSHGSAGGGMNANMRGVFLHVLADTLGSIGVIVSTVLIEQFGWFIADPLCSLFIAILIFLSVVPLIKDACQVLLLRLPPEYEKELHIALEKIQKIEGLISYRDPHFWRHSASIVAGTIHIQVTSDVLEQRIVQQVTGILKDAGVNNLTIQVEKEAYFQHMSGLSTGFHDVLAMTKQMESMKYCKDGTYIM

SEQ ID NO: 784 - protein, 517 aa, Homo sapiens
EARRPCTLHLRSALHPATMCELYSKRDTLGLRKKHIGPSCKVFFASDPIKIVRAQRQYMFDENGEQYLDCINNVAHVGHCHPGVVKAALKQMELLNTNSRFLHDNIVEYAKRLSATLPEKLSVCYFTNSGSEANDLALRLARQFRGHQDVITLDHAYHGHLSSLIEISPYKFQKGKDVKKEFVHVAPTPDTYRGKYREDHADSASAYADEVKKIIEDAHNSGRKIAAFIAESMQSCGGQIIPPAGYFQKVAEYVHGAGGVFIADEVQVGFGRVGKHFWSFQMYGEDFVPDIVTMGKPMGNGHPVACVVTTKEIAEAFSSSGMEYFNTYGGNPVSCAVGLAVLDIIENEDLQGNAKRVGNYLTELLKKQKAKHTLIGDIRGIGLFIGIDLVKDHLKRTPATAEAQHIIYKMKEKRVLLSADGPHRNVLKIKPPMCFTEEDAKFMVDQLDRILTVLEEAMGTKTESVTSENTPCKTKMLKEAHIELLRDSTTDSKENPSRKRNGMCTDTHSLLSKRLKT

SEQ ID NO: 785 - protein, 136 aa, Homo sapiens
HELGRATTALLLSFLGRRTIQAGSQAMAGLAILANMLVPQDLQTLRVVFAVLGKGCFGISLTCLTIYKAELFPTPVRMTADGILHTVGRLGAMMGPLILMSRQALPLLLLSSMALSHCFQPGCAVLPPGDPGTSAP

SEQ ID NO: 786 - protein, 176 aa, Homo sapiens
  SITE (158): Xaa equals any of the naturally occurring L-amino acids
MCMVIFAPLFAIFAFATCGGYSGGLRLSVDCVNKTESNLSIDIAFAYPFRLHQVTFEVPTCEGKERQKLALIGDSSSSAEFFVTVAVFAFLYSLAATVVYIFFQNKYRENNRGPLIDFIVTVVFSFLWLVGSSAWAKGLSDVKVATDPKEVLLLMSAXKQAIQQMHGLSTALLCQA

SEQ ID NO: 787 - protein, 343 aa, Homo sapiens
PRVRPNATKSSYNPGDVVYFVCRPGYKPVVPSLPMFSVCQDNNMWTPLQEACTAKQCQHPREPINGQIVAVNGSFSYGSQIHYSCNEGYRLVGKRILYCELSTNDEKKVTWSDDPPLCIRIMCPPPGKIPNGRYTGSEKDEFEYNEVVTYSCNPSNGPDEYSLVGESNLICTGNGVWSSNPPECKVVKCPFPNPENGRLLSGFRKKYYYKATVTFECYPGYYHEGENTAVCGSNSTWEPAKPTCLKVLIPSSTSPPILNHTVSTPPSTKPPIPSVSEPESPHTTMPPSSTTTSPGPRPNPDDDPNPDGPTTLDGGIIAVIVVSVLAVVAVLGGFLCYRHKKKG

SEQ ID NO: 788 - protein, 187 aa, Homo sapiens
  SITE (179): Xaa equals any of the naturally occurring L-amino acids
  SITE (186): Xaa equals any of the naturally occurring L-amino acids
GRVGSSNGYVNISELQTSFPVGTVISYRCFPGFKLDGSAYLECLQNLIWSSSPPRCLALEVCPLPPMVSHGDFVCHPRPCERYNHGTVVEFYCDPGYSLTSDYKYITCQYGEWFPSYQVYCIKSEQTWPSTHETLLTTWKIVAFTATSVLLVLLLVILARMFQTKLRPTFPPGGLPGVXAVTLTLXW

SEQ ID NO: 789 - protein, 254 aa, Homo sapiens
YTKAEKFKSFQHSRLYQQFNENNSIGETQARKLSKLRVHEFIFHTRKFITRIYPKATRADSSNFNPQEFWNIGCQMVALNFQTPGLPMDLQNGKFLDNGGSGYILKPHFLRESKSYFNPSNIKEGMPITLTIRLISGIQLPLTHSSSNKGDSLVIIEVFGVPNDQMKQQTRVIKKNAFSPRWNETFTFIIHVPELALIRFVVEGQGLIAGNEFLGQYTLPLLCMNKGYRRIPLFSRMGESLEPASLFVYVWYVR

SEQ ID NO: 790 - protein, 576 aa, Homo sapiens
  SITE (218): Xaa equals any of the naturally occurring L-amino acids
  SITE (225): Xaa equals any of the naturally occurring L-amino acids
  SITE (233): Xaa equals any of the naturally occurring L-amino acids
  SITE (317): Xaa equals any of the naturally occurring L-amino acids
  SITE (318): Xaa equals any of the naturally occurring L-amino acids
  SITE (474): Xaa equals any of the naturally occurring L-amino acids
AGLKGARGKMISAGLPGEMGSPGEPGPPGRKGVKGAKGLASFSTCELIQYVRDRSPGRHGKPECPVHPTELVFALDHSRDVTEQEFERMKEMMAFLVRDIKVRENSCPVGAHIAILSYNSHARHLVRFSDAYKKSQLLREIETIPYERSSASREIGRAMRFISRNVFKRTLPGAHTRKIATFFSSGQSADAHSITTAAMEFGALEIIPVVITFSNVPXVRRAFAXDDTGTFQXIVVPSGADYIPALERLQRCTFCYDVCKPDASCDQARPPPVQSYMDAAFLLDASRNMGSAEFEDIRAFLGALLDHFEITPEPETXXTGDRVALLSHAPPDFLPNTQKSPVRAEFNLTTYRSKRLMKRHVHESVKQLNGDAFIGHALQWTLDNVFLSTPNLRRNKVIFVISAGETSHLDGEILKKESLRAKCQGYALFVFSLGPIWDDKELEDLASHPLDHHLVQLGRIHKPDHSYGVKFVKXFINSIRRAINKYPPINLKIKCNRLNSIDPKQPPRPFRSFVPGPLKATLKEDVLQKAKFFQDKKYLSRVARSGRDDAIQNFMRSTSHTFKNGRMIESAPKQHD

SEQ ID NO: 791 - protein, 396 aa, Homo sapiens
  SITE (63): Xaa equals any of the naturally occurring L-amino acids
  SITE (73): Xaa equals any of the naturally occurring L-amino acids
  SITE (77): Xaa equals any of the naturally occurring L-amino acids
  SITE (336): Xaa equals any of the naturally occurring L-amino acids
  SITE (370): Xaa equals any of the naturally occurring L-amino acids
  SITE (387): Xaa equals any of the naturally occurring L-amino acids
  SITE (392): Xaa equals any of the naturally occurring L-amino acids
  SITE (394): Xaa equals any of the naturally occurring L-amino acids
AFAIKFTLIDSQAQYPVVNTNYGKIQGLRTPLPSEILGPVEQYLGVPYASPPTGERRFQPPEXPSSWTGIRNXTQFXAVCPQHLDERSLLHDMLPIWFTANLDTLMTYVQDQNEDCLYLNIYVPTEDDIHDQNSKKPVMVYIHGGSYMEGTGNMIDGSILASYGNVIVITINYRLGILGFLSTGDQAAKGNYGLLDQIQALRWIEENVGAFGGDPKRVTIFGSGAGASCVSLLTLSHYSEGLFQKAIIQSGTALSSWAVNYQPAKYTRILADKVGCNMLDTTDMVECLRNKNYKELIQQTITPATYHIAFGPVIDGDVIPDDPQILMEQGEFLNYXIMLGVNQGEGLKFVDGIVDNEDGVTPNDFDFSVXNFGDNLLRVPLKGKTFXGKLSXSXTQ

SEQ ID NO: 792 - protein, 357 aa, Homo sapiens
PERRSPGPAPRAPRLVGRGDCDPLLSVCLTTMPLYEGLGSGGEKTAVVIDLGEAFTKCGFAGETGPRCIIPSVIKRAGMPKPVRVVQYNINTEELYSYLKEFIHILYFRHLLVNPRDRRVVIIESVLCPSHFRETLTRVLFKYFEVPSVLLAPSHLMALLTLGINSAMVLDCGYRESLVLPIYEGIPVLNCWGALPLGGKALHKELETQLLEQCTVDTSVAKEQSLPSVMGSVPEGVLEDIKARTCFVSDLKRGLKIQAAKFNIDGNNERPSPPPNVDYPLDGEKILHILGSIRDSVVEILFEQDNEEQSVATLILDSLIQCPIDTRKQLAENLVVIGGTSMLPGFLHRLLAEIGIW

SEQ ID NO: 793 - protein, 327 aa, Homo sapiens
HQSLQVPQPGWPEGVGPRGMHCPTQQQVGACPQARITWRCHSPQAPLPDTYRGPYREDHPNPAMAYANEVKRVVSSAQEKGRKIAAFFAESLPSVGGQIIPPAGYFSQVAEHIRKAGGVFVADEIQVGFGRVGKHFWAFQLQGKDFVPDIVTMGKSIGNGHPVACVAATQPVARAFEATGVEYFNTFGGSPVSCAVGLAVLNVLEKEQLQDHATSVGSFLMQLLGQQKIKHPIVGDVRGVGLFIGVDLIKDEATRTPATEEAAYLVSRLKENYVLLSTDGPGRNILKFKPPMCFSLDNARQVVAKLDAILTDMEEKVRSCETLRLQP

SEQ ID NO: 794 - protein, 92 aa, Homo sapiens
  SITE (66): Xaa equals any of the naturally occurring L-amino acids
  SITE (70): Xaa equals any of the naturally occurring L-amino acids
  SITE (75): Xaa equals any of the naturally occurring L-amino acids
  SITE (92): Xaa equals any of the naturally occurring L-amino acids
GQRVHRFRRRFAVLNTGHRHPDLVAAVEQQLQQFTHTAYQIVPYESYVTLAEKINALAPVSGQAKXAFLXHRAEXVEKRGENWFAPITGTPX

SEQ ID NO: 795 - protein, 132 aa, Homo sapiens
  SITE (77): Xaa equals any of the naturally occurring L-amino acids
WIPRAAGIRHELEIHKEHLSPVVTAYFQKPLLLHQGHMEWLFDAEGNRYLDFFSGIVTVSVGHCHPKVNAVAQKQLXRLWHTSTIFFHPPMHEYAEKLAALLPEPLKVIFLVNSGSEANELAMLMAGRTQTT

SEQ ID NO: 796 - protein, 287 aa, Homo sapiens
  SITE (146): Xaa equals any of the naturally occurring L-amino acids
  SITE (180): Xaa equals any of the naturally occurring L-amino acids
HDFPAEQVDDLNLTSGEIVYLLEKIDTDWYRGNCRNQIGIFPANYVKVIIDIPEGGNGKRECVSSHCVKGSRCVARFEYIGEQKDELSFSEGEIIILKEYVNEEWARGEVRGRTGIFPLNFVEPVEDYPTSGANVLSTKVPLKTKXEDSGSNSQVNSLPAEWCEALHSFTAETSDDLSFXRGDRIQILERLDSDWCRGRLQDREGIFPAVFVRPCPAEAKSMLAIVPKGRKAKALYDFRGENEDELSFKAGDIITELESVDDDWMSGELMGKSGIFPKNYIQFLQIS

SEQ ID NO: 797 - protein, 186 aa, Homo sapiens
  SITE (177): Xaa equals any of the naturally occurring L-amino acids
  SITE (178): Xaa equals any of the naturally occurring L-amino acids
ARAATHFNLKTHTNSRDLKTAIEKITQRGGLSNVGRAISFVTKNFFSKANGNRSGAPNVVVVMVDGWPTDKVEEASRLARESGINIFFITIEGAAENEKQYVVEPNFANKAVCRTNGFYSLHVQSWFGLHKTLQPLVKRVCDTDRLACSKTCLNSADIGFVIDGFSSVGTGNFRPSXXCDQPHQRV

SEQ ID NO: 798 - protein, 175 aa, Homo sapiens
  SITE (16): Xaa equals any of the naturally occurring L-amino acids
  SITE (19): Xaa equals any of the naturally occurring L-amino acids
WFYPVMTMLGHPISPXTWXINESIDSMLEICIGFVVPFLIMGVCYFITERTLMKMPNIKISRPLKVLLTVVIVFIVTQLPYNIVKFCRAIDIIYSLITSCNMSKRMDIAIQVTESIALFHSCLNPILYVFMGASFKNYVMKVAKKYGSWRRQRQSVEEFPFDSEGPTEPTSTFSI

SEQ ID NO: 799 - protein, 122 aa, Homo sapiens
GAAQYSPEALASIQNHVRKREAPAPEAESKQTEKDPGVQELEALIDTIQKQLKDHSCKDNIREAFQIYDKEASGYVDRDMFFKICESLNVPVDDSLVKELIRMCSHGEGKINYYNFVRAFSN

SEQ ID NO: 800 - protein, 180 aa, Homo sapiens
DDTDSMYGECRTYIIHYYLMDDTVEIREVHERNDGRDPFPLLMNRQRVPKVLVENAKNFPQCVLEISDQEVLEWYTAKDFIVGKSLTILGRTFFIYDCDPFTRRYYKEKFGITDLPRIDVSKREPPPVKQELPPYNGFGLVEDSAQNCFALIPKAPKKDVIKMLVNDNKVLRYLAVLLPT

SEQ ID NO: 801 - protein, 179 aa, Homo sapiens
FTRPSWSTSASRIMASSSSCGSGCPSPAMARLSSSTVMWPSPSWSKARKATCRSSRPALAFFAAVRNSWKLISPSPSLSTSEMSFLSWASERFLPVAFSAAPSSWALMVPFPSVSTAEKAFLYWASSSGVSSPAMPASPAPRGASELLPTGPQPAALRARGPECRQPQGSGQRLSQTVL

SEQ ID NO: 802 - protein, 435 aa, Homo sapiens
KMAAAAGSCARVAAWGGKLRRGLAVSRQAVRSPSPLAAAVAGAALAGAGAAWHHSRVSVAARDGSFTVSAQKNVEHGIIYIGKPSLRKQRFMQFSSLEHEGEYYMTPRDFLFSVMFEQMERKTSVKKLTKKDIEDTLSGIQTAGCGSTFFRDLGDKGLISYTEYLFLLTILTKPHSGFHVAFKMLDTDGNEMIEKREFFKLQKIISKQDDLMTVKTNETGYQEAIVKEPEINTTLQMRFFGKRGQRKLHYKEFRRFMENLQTEIQEMEFLQFSKGLSFMRKEDFAEWLLFFTNTENKDIYWKNVREKLSAGESISLDEFKSFCHFTTHLEDFAIAMQMFSLAHRPVRLAEFKRAVKVATGQELSNNILDTVFKIFDLDGDECLSHEEFLGVLKNRMHRGLWVPQHQSIQEYWKCVKKESIKGVKEVWKQAGKGLF

SEQ ID NO: 803 - protein, 283 aa, Homo sapiens
FMAYGSAKDLICTHFMDGMNELAIAYILQGVLKALDYIHHMGYVHRSVKASHILISVDGKVYLSGLRSNLSMISHGQRQRVVHDFPKYSVKVLPWLSPEVLQQNLQGYDAKSDIYSVGITACELANGHVPFKDMPATQMLLEKLNGTVPCLLDTSTIPAEELTMSPSRSVANSGLSDSLTTSTPRPSNGDSPSHPYHRTFSPHFHHFVEQCLQRNPDARPSASTLLNHSFFKQIKRRASEALPELLRPVTPITNFEGSQSQDHSGIFGLVTNLEELEVDDWEF

SEQ ID NO: 804 - protein, 360 aa, Homo sapiens
IMKATIILLLLAQVSWAGPFQQRGLFDFMLEDEASGIGPEVPDDRDFEPSLGPVCPFRCQCHLRVVQCSDLGLDKVPKDLPPDTTLLDLQNNKITEIKDGDFKNLKNLHALILVNNKISKVSPGAFTPLVKLERLYLSKNQLKELPEKMPKTLQELRAHENEITKVRKVTFNGLNQMIVIELGTNPLKSSGIENGAFQGMKKLSYIRIADTNITSIPQGLPPSLTELHLDGNKISRVDAASLKGLNNLAKLGLSFNSISAVDNGSLANTPHLRELHLDNNKLTRVPGGLAEHKYIQVVYLHNNNISVVGSSDFCPPGHNTKKASYSGVSLFSNPVQYWEIQPSTFRCVYVRSAIQLGNYK

SEQ ID NO: 805 - protein, 602 aa, Homo sapiens
SMLKRLARDQLIYLLEQLPGKKDLFIEADLMSPLDRIANVSILKQHEVDKLYKVENKPALSSNEQLCFLVRPRIKNMRYIASLVNADKLAGRTRKYKVIFSPQKFYACEMVLEEEGIYGDVSCDEWAFSLLPLDVDLLSMELPEFFRDYFLEGDQRWINTVAQALHLLSTLYGPFPNCYGIGRCAKMAYELWRNLEEEEDGETKGRRPEIGHIFLLDRDVDFVTALCSQVVYEGLVDDTFRIKCGSVDFGPEVTSSDKSLKVLLNAEDKVFNEIRNEHFSNVFGFLSQKARNLQAQYDRRRGMDIKQMKNFVSQELKGLKQEHRLLSLHIGACESIMKKKTKQDFQELIKTEHALLEGFNIRESTSYIEEHIDRQVSPIESLRLMCLLSITENGLIPKDYRSLKTQYLQSYGPEHLLTFSNLRRAGLLTEQAPGDTLTAVESKVSKLVTDKAAGKITDAFSSLAKRSNFRAISKKLNLIPRVDGEYDLKVPRDMAYVFSGAYVPLSCRIIEQVLERRSWQGLDEVVRLLNCSDFAFTDMTKEDKASSESLRLILVVFLGGCTFSEISALRFLGREKGYRFIFLTTAVTNSARLMEAMSEVKA

SEQ ID NO: 806 - protein, 183 aa, Homo sapiens
  SITE (170): Xaa equals any of the naturally occurring L-amino acids
PLTLSMANTTGEPEEVSGALSPPSASAYVKLVLLGLIMCVSLAGNAILSLLVLKERALHKAPYYFLLDLCLADGIRSAVCFPFVLASVRHGSSWTFSALSCKIVAFMAVLFCFHAAFMLFCISVTRYMAIAHHRFYAKRMTLWTCAAVICMAWTLSVAMAFPPVFDVGTXKFIREEDKCIFEH

SEQ ID NO: 807 - protein, 271 aa, Homo sapiens
DPRVRARPERDPAMQEPLLGAEGPDYDTFPEKPPPSPGDRARVGTLQNKRVFLATFAAVLGNFSFGYALVYTSPVIPALERSLDPDLHLTKSQASWFGSVFTLGAAAGGLSAMILNDLLGRKLSIMFSAVPSAAGYALMAGAHGLWMLLLGRTLTGFAGGLTAACIPGLTLPSRPGLGTSIFSKTWCGGCVLQVPPAAVALAGCGRGGACAHHDPAAQLHAQLAALPALSGQGRRGPAGAGLPAWDGRRCPLGVRADPGQRPETEQPSIVG

SEQ ID NO: 808 - protein, 192 aa, Homo sapiens
EKIMQATATTLDHEQEYTPINSRNKVLVASLIGTAIEFFDFYIYATAAVIVFPHIFFPQGDPTAATLQSLATFAIAFVARPIGSAVFGHFGDRVGRKATLVASLLTMGISTVVIGLLPGYATIGIFAPLLLALARFGQGLGLGGPVPNSPYSESYYNSLAVVLQRRDWENPGVTQLNRLADIPFRQAGVIAK

SEQ ID NO: 809 - protein, 442 aa, Homo sapiens
HEAPRAPGLVGRGDCDPLLSVCLTTMPLYEGLGSGGEKTAVVIDLGEAFTKCGFAGETGPRCIIPSVIKRAGMPKPVRVVQYNINTEELYSYLKEFIHILYFRHLLVNPRDRRVVIIESVLCPSHFRETLTRVLFKYFEVPSVLLAPSHLMALLTLGINSAMVLDCGYRESLVLPIYEGIPVLNCWGALPLGGKALHKELETQLLEQCTVDTSVAKEQSLPSVMGSVPEGVLEDIKARTCFVSDLKRGLKIQAAKFNIDGNNERPSPPPNVDYPLDGEKILHILGSIRDSVVEILFEQDNEEQSVATLILDSLIQCPIDTRKQLAENLVVIGGTSMLPGFLHRLLAEIRYLVEKPKYKKALGTKTFRIHTPPAKANCVAWLGGAIFGALQDILGSRSVSKEYYNQTGRIPDWCSLNNPPLEMMFDVGKTQPPLMKRAFSTEK

SEQ ID NO: 810 - protein, 238 aa, Homo sapiens
  SITE (152): Xaa equals any of the naturally occurring L-amino acids
ELMSFLVSKPERIRRWVSEKFIVEGLRDLELFGEQPPGDTRRKTNDASSESIASFSKQEVMSSFLPEGGCYELLTVIGKGFEDLMTVNLARYKPTGEYVTVRRINLEACSNEMVTFLQGELHVSKLFNHPNIVPYRATFIADNELWVVTSFXAYGSAKDLICTHFMDGMNELAIAYILQGVLKALDYIHHMGYVHRSVKASHILISVDGKVYLSGLRKPAAALVLSPRAISVLPSLRA

SEQ ID NO: 811 - protein, 187 aa, Homo sapiens
ARGKLKPEVVEELTRKTYFTEKEVQQWYKGFIKDCPSGQLDAAGFQKIYKQFFPFGDPTKFATFVFNVFDENKDGRIEFSEFIQALSVTSRGTLDEKLRWAFKLYDLDNDGYITRNEMLDIVDAIYQMVGNTVELPEEENTPEKRVDRIFAMMDKNADGKLTLQEFQEGSKADPSIVQALSLYDGLV

SEQ ID NO: 812 - protein, 164 aa, Homo sapiens
DWTVFTVGSWLWVISPFMAYGSASQLLRTYFPEGMSETLIRNILFGAVRGLNYLHQNGCIHRSIKASHILISGDGLVTLSGLSHLHSLVKHGQRHRAVYDFPQFSTSVQPWLSPELLRQDLHGYNVKSDIYSVGITACELASGQVPFQDMHRTQLGTALFATRS

SEQ ID NO: 813 - protein, 92 aa, Homo sapiens
  SITE (4): Xaa equals any of the naturally occurring L-amino acids
DIEXLVFHLVIQAEILSVLSHRNIIQFYGVILEPPNYGIVTEYASLGSLYDYINSNRSEEMDMDHIMTWATDVAKGMHYLHMEAPVKVIHRD

SEQ ID NO: 814 - protein, 280 aa, Homo sapiens
  SITE (105): Xaa equals any of the naturally occurring L-amino acids
  SITE (278): Xaa equals any of the naturally occurring L-amino acids
QLPAKTEPIKERAVQPAPTRKPTVIRIPAKPGKCLHEDPQSPPPLPAEKPIGNTFSTVSGKLSNVERTRNLESNHPGQTGGFVRVPPRLPPRPVNGKTIPTQQPXTKVPPERPPPPKLSATRRSNKKLPFNRSSSDMDLQKKQSNLATGLSKAKSQVFKNQDPVLPPRPKPGHPLYSKYMLSVPHGIANEDIVSQNPGELSCKRGDVLVMLKQTENNYLECQKGEDTGRVHLSQMKIITPLDEHLRSRPNPFSPPKDPSHAQKPVDSGAPHAVGLLFXTV

SEQ ID NO: 815 - protein, 219 aa, Homo sapiens
DPRVRGTQRVLLDNVLSEEQCRELHSVASGIMLVGDGYRGKTSPHTPNEKFEGATVLKALKSGYEGRVPLKSARLFYDISEKARRIVESYFMLNSTLYFSYTHMVCRTALSGQQDRRNDLSHPIHADNCLLDPEANECWKEPPAYTFRDYSALLYMNDDFEGGEFIFTEMDAKTVTASIKPMWAHDQLLIWRREPSWGEGSHQGKEVCCGSVVHLGPTL

SEQ ID NO: 816 - protein, 517 aa, Homo sapiens; identical to SEQ ID NO: 784

SEQ ID NO: 817 - protein, 287 aa, Homo sapiens
WIPWALWNTAHNVGGALIPIVMAAAALHYGWRAGMMIAGCMAIVVGIFLCWRLRDRPQALGLPAVGEWRHDALEIAQQQEGAGLTRKEILTKYVLLNPYIWLLSFCYVLVYVVRAAINDWGNLYMSETLGVDLVTANTAVTMFELGGFIGALVAGWGSDKLFNGNRGPMNLIFAAGILLSVGSLWLMPFASYVMQATCFFTIGFFVFGPQMLIGMAAAECSHKEAAGAATGFVGLFAYLGASLAGWPLAKVLDTWHWSGFFVVISIAAGISALLLLPFLNAQTPREA

SEQ ID NO: 818 - protein, 273 aa, Homo sapiens
LPHRCQPGAAGHRSHQHVGLPRLLLPGHRQLWTDSRERSVGGVHPGGGLVTGVLVLLSLDYLTSLFYYIPKSALAAVIIMAVAPLFDTKIFRTLWRVKRLDLLPLCVTFLLCFWEVQYGILAGALVSLLMLLHSAARPETKVSEGPVLVLQPASGLSFPAMEALREEILSRALEVSPPRCLVLECTHVCSIDYTVVLGLGELLQDFQKQGVALAFVGLQVPVLRVLLSADLKGFQYFSTLEEAEKHLRQEPGTQPYNIREDSILDQKVALLKA

SEQ ID NO: 819 - protein, 514 aa, Homo sapiens
SRRHRNYMSRTHLHTPPDLPEGYEQRTTQQGQVYFLHTQTGVSTWHDPRVPRDLSNINCEELGPLPPGWEIRNTATGRVYFVDHNNRTTQFTDPRLSANLHLVLNRQNQLKDQQQQQVVSLCPDDTECLTVPRYKRDLVQKLKILRQELSQQQPQAGHCRIEVSREEIFEESYRQVMKMRPKDLWKRLMIKFRGEEGLDYGGVAREWLYLLSHEMLNPYYGLFQYSRDDIYTLQINPDSAVNPEHLSYFHFVGRIMGMAVFHGHYIDGGFTLPFYKQLLGKSITLDDMELVDPDLHNSLVWILENDITGVLDHTFCVEHNAYGEIIQHELKPNGKSIPVNEENKKEYVRLYVNWRFLRGIEAQFLALQKGFNEVIPQHLLKTFDEKELELIICGLGKIDVNDWKVNTRLKHCTPDSNIVKWFWKAVEFFDEERRARLLQFVTGSSRVPLQGFKALQGAAGPRLFTIHQIDACTNNLPKAHTCFNRIDIPPYESYEKLYEKLLTAIEETCGFAVE

SEQ ID NO: 820 - protein, 62 aa, Homo sapiens
  SITE (16): Xaa equals any of the naturally occurring L-amino acids
  SITE (19): Xaa equals any of the naturally occurring L-amino acids
NKIPMTLTHSRSQTHXLYXQFNILKTLKIPYLATTINTISPEMASFKKLPLPHRKEKTELKL

SEQ ID NO: 821 - protein, 144 aa, Homo sapiens
  SITE (82): Xaa equals any of the naturally occurring L-amino acids
  SITE (86): Xaa equals any of the naturally occurring L-amino acids
  SITE (87): Xaa equals any of the naturally occurring L-amino acids
  SITE (106): Xaa equals any of the naturally occurring L-amino acids
  SITE (111): Xaa equals any of the naturally occurring L-amino acids
  SITE (113): Xaa equals any of the naturally occurring L-amino acids
  SITE (114): Xaa equals any of the naturally occurring L-amino acids
  SITE (125): Xaa equals any of the naturally occurring L-amino acids
  SITE (142): Xaa equals any of the naturally occurring L-amino acids
GCILILHPSMANYSHAADNILQNLSPLTAFLKLTSLGFIIGVSVVGNLLISILLVKDKTLHRAPYYFLLDLCCSDILRSAIXFPFXXNSVKNGSTWTYGTLTCKVXAFLGXLXXFHTAFMLFCIXVTRYLISPITASIQRGXPL

SEQ ID NO: 822 - protein, 521 aa, Homo sapiens
GTKKLMPKTSLPTVKKLATATTGPSKAKTSRTPSRDSQKLTSRDSGPNGGFQSGGSYHPGRKRSKTQTPQQRSVSSQEEEHSSPVKAPSVKRTPMPDKTATPERPPAPENAPSSKKIPAPDKVPSPEKTLTLGDKASIPGNSTSGKIPAPDKVPTPEKMVTPEDKASIPENSIIPEETLTVDKPSTPERVFSVEESPALEAPPMDKVPNPKMAPLGDEAPTLEKVLTPELSEEEVSTRDDIQFHHFSSEEALQKVKYFVAKEDPSSQEEAHTPEAPPPQPPSSERCLGEMKCTLVRGDSSPRQAELKSGPASRPALEKPHPHEEATTLPEEAPSNDERTPEEEAPPNEQRPLREEVLPKEGVASKEEVTLKEELPPKEEVAPKEEVPPIERAFAQKTRPIKPPPDSQETLALPSLVPQNYTENKNEGVDVTSLRGEVESLRRALELMEEEADRHLGGAEEREGAAPAAGGPGDAGDPEVPDPARHPHADADLLRVGLGRDRGLTWLGPPTSLHTTLGNARK

SEQ ID NO: 823 - protein, 91 aa, Homo sapiens
MYVILVTTNICIFSAAAAGPGWLRHARPGKDPAPSPELPGYSFPAKFNLFLIIVQFSRKWRSCFFPRSGGPGRGRAQRFRPRCRQRLRQSD

SEQ ID NO: 824 - protein, 679 aa, Homo sapiens
GTSSSMLGEGQVLRSPTNRLLLHFQSPRVPRGGGFRIHYQAYLLSCGFPPRPAHGDVSVTDLHPGGTATFHCDSGYQLQGEETLICLNGTRPSWNGETPSCMASCGGTIHNATLGRIVSPEPGGAVGPNLTCRWVIEAAEGRRLHLHFERVSLDEDNDRLMVRSGGSPLSPVIYDSDMDDVPERGLISDAQSLYVELLSETPANPLLLSLRFEAFEEDRCFAPFLAHGNVTTTDPEYRPGALATFSCLPGYALEPPGPPNAIECVDPTEPHWNDTEPACKAMCGGELSEPAGVVLSPDWPQSYSPGQDCVWGVHVQEEKRILLQVEILNVREGDMLTLFDGDGPSARVLAQLRGPQPRRRLLSSGPDLTLQFQAPPGPPNPGLGQGFVLHFKEVPRNDTCPELPPPEWGWRTASHGDLIRGTVLTYQCEPGYELLGSDILTCQWDLSWSAAPPACQKIMTCADPGEIANGHRTASDAGFPVGSHVQYRCLPGYSLEGAAMLTCYSRDTGTPKWSDRVPKCALKYEPCLNPGVPENGYQTLYKHHYQAGESLRFFCYEGFELIGEVTITCVPGHPSQWTSQPPLCKVAYEELLDNRKLEVTQTTDPSRQLEGGNLALAILLPLGLVIVLGSGVYIYYTKLQGKSLFGFSGSHSYSPITVESDFSNPLYEAGDTREYEVSI

SEQ ID NO: 825 - protein, 190 aa, Homo sapiens
  SITE (146): Xaa equals any of the naturally occurring L-amino acids
  SITE (158): Xaa equals any of the naturally occurring L-amino acids
  SITE (168): Xaa equals any of the naturally occurring L-amino acids
  SITE (177): Xaa equals any of the naturally occurring L-amino acids
LHRDLKTQNILLDKHRMVVKIGDFGISKILSSKSKAYTVVGTPCYISPELCEGKPYNQKSDIWALGCVLYELASLKRAFEAANLPALVLKIMSGTFAPISDRYSPELRQLVLSLLSLEPAQRPPLSHIMAQPLCIRALLNLHTDVXSVRMRRAEKSVXPSNTGSRTTXVRCRGIPRXPVRPAIPPPLSSV

SEQ ID NO: 826 - protein, 267 aa, Homo sapiens
  SITE (79): Xaa equals any of the naturally occurring L-amino acids
  SITE (111): Xaa equals any of the naturally occurring L-amino acids
  SITE (248): Xaa equals any of the naturally occurring L-amino acids
  SITE (262): Xaa equals any of the naturally occurring L-amino acids
  SITE (263): Xaa equals any of the naturally occurring L-amino acids
  SITE (264): Xaa equals any of the naturally occurring L-amino acids
ARGEVRYVKEPYIQSRFYRAPEILLGLPFCEKVDVWSLGCVMAELHLGWPLYPGNNEYDQVRYICETQGLPKPHLLHAXCKAHHFFKRNPHPDAANPWQLKSSADYLAETXVRPLERRKYMLKSLDQIETVNGGSVASRLTFPDREALAEHADLKSMVELIKRMLTWESHERISPSAALRHPFVSMQQLRSAHETTHYYQLSLRSYRLSLQVEGKPPTPVVAAEDGTPYYCLAEEKEAAGMGSVAGSXPFFREEKAPGMQRXXXPAG

SEQ ID NO: 827 - protein, 434 aa, Homo sapiens
QVPARNSRVDPRVRKDCSLDCAGSPQKPLCASDGRTFLSRCEFQRAKCKDPQLEIAYRGNCKDVSRCVAERKYTQEQARKEFQQVFIPECNDDGTYSQVQCHSYTGYCWCVTPNGRPISGTAVAHKTPRCPGSVNEKLPQREGTGKTVSLQIFSVLNSDDAAAPALETQPQGDEEDIASRYPTLWTEQVKSRQNKTNKNSVSSCDQEHQSALEEAKQPKNDNVVIPECAHGGLYKPVQCHPSTGYCWCVLVDTGRPIPGTSTRYEQPKCDNTARAHPAKARDLYKGRQLQGCPGAKKHEFLTSVLDALSTDMVHAASDPSSSSGRLSEPDPSHTLEERVVHWYFKLLDKNSSGDIGKKEIKPFKRFLRKKSKPKKCVKKFVEYCDVNNDKSISVQELMGCLGVAKEDGKADTKKRHTPRGHAESTSNRQPRKQG

SEQ ID NO: 828 - protein, 279 aa, Homo sapiens
GRWQVLLACGFHFPYLTFRADDESSEPVNTNVVLRYDGLITWDAPAITKSSCVVDVTYFPFDNQQCNLTFGSWTYNGNQVDIFNALDSGDLSDFIEDVEWEVHGMPAVKNVISYGCCSEPYPDVTFTLLLKRRSSFYIVNLLIPCVLISFLAPLSFYLPAASGEKVSLGVTILLAMTVFQLMVAEIMPASENVPLIGESKCLPLQAQLCSAWGHAFKVVCVPLNLKKWSQFRHNTDCLKFFWWLQLASFNIDEPFAIKTGLMVSGFTRKSNERHYTLEQ

SEQ ID NO: 829 - protein, 202 aa, Homo sapiens
DFTMTFYLRHYWKDERLSFPSTANKSMTFDHRLTRKIWVPDIFFVHSKRSFIHDTTMENIMLRVHPDGNVLLSLRITVSAMCFMDFSRFPLDTQNCSLELESYAYNEDDLMLYWKHGNKSLNTEEHMSLSQFFIEDFSASSGLAFYSSTGWYNRLFINFVLRRHVFFFVLQTYFPAILMVMLSWVSFWIDRRAVPARVSLDF

SEQ ID NO: 830 - protein, 140 aa, Homo sapiens
  SITE (89): Xaa equals any of the naturally occurring L-amino acids
  SITE (139): Xaa equals any of the naturally occurring L-amino acids
LSCGSVSTLCATMAVTACQGLGFVVSLIGIAGIIAATCMDQWSTQDLYNNPVTAVFNYQGLWRSCVRESSGFTECRGYFTLLGLPAMLXAVRALMIVGIAWVPLPPGIHLCLKCIRIAAWRTLPKQHDTDLRDHGHWLXL

SEQ ID NO: 831 - protein, 170 aa, Homo sapiens
  SITE (118): Xaa equals any of the naturally occurring L-amino acids
AVSLIKSFSKNTKNCTRKKERKKERKKYILMWLFKKYIQGLAHLHAHRVIHRDIKGQNVLLTHNAEVKLVDFGVSAQVSRTNGRRNSFIGTPYWMAPEVIDCDEDPRRSYDYRSDVWXVGITAIEMAEGAPPLVTFNPWKLSSLFCGNLLPQSNPADGPVSSTISWKSVR

SEQ ID NO: 832 - protein, 568 aa, Homo sapiens
QIALNIAQMITEFVFIPIFAIAAGVAQSLQYLNRYHVIREPPEHILNRLPSSASALACSAHALNLIEKRTLDHEEMKALNREVIEYFKEHVNPGFLEYRKSVTAGGDYGAVEWQAGSLNTLVDTQGQEFIDCLGGFGIFNVGHRNPVVVSAVQNQLATMSSVGGEPWGFSKTCFLLLIRCRLVNLNLFNLVYKSIMTTDDLAFDQRHIWHPYTSMTSPLPVYPVVSAEGCELILSDGRRLVDGMSSWWAAIHGYNHPQLNAAMKSQIDAMSHVMFGGITHAPAIELCRKLVAMTPQPLECVFLADSGSVAVEVAMKMALQYWQAKGEARQRFLTFRNGYHGDTFGAMSVCDPDNSMHSLWKGYLPENLFAPAPQSRMDGEWDERDMVGFARLMAAHRHEIAAVIIEPIVQGAGGMRMYHPEWLKRIRKICDREGILLIADEIATGFGRTGKLFACEHAEIAPDILCLGKALTGGTMTLSATLTTREVAETISNGEAGCFMHGPTFMGNPLACAAANASLAILESGDWQQQVADIEVQCASNLPPPVMPKWLPMCAYWGPLAWSKPLIR

SEQ ID NO: 833 - protein, 145 aa, Homo sapiens
GTSITSSGHVARLEFQTDHSTGKRGFNITFTTFRHNECPDPGVPVNGKRFGDSLQLGSSISFLCDEGFLGTQGSETITCVLKEGSVVWNSAVLRCEAPCGGHLTSPSGTILAPGWPGFYKDALSCAWVIEAQPGYPIKITFDRCL

SEQ ID NO: 834 - protein, 62 aa, Homo sapiens
AFLKKTGDLFAIKVFNNISFLRPVDVQMREFEVLKKLNHKNIVKLFAIEEEVSSKTSILYLL

SEQ ID NO: 835 - protein, 220 aa, Homo sapiens
ANLLANDVDFHSFPFVAFGKGIIKKCRTSPDAFVQLALQLAHYKDMGKFCLTYEASMTRLFREGRTETVRSCTTESCDFVRAMVDPAQTVEQRLKLFKLASEKHQHMYRLAMTGSGIDRHLFCLYVVSKYLAVESPFLKEVLSEPWRLSTSQTPQQQVELFDLENNPEYVSSGGGFGPVADDGYGVSYILVGENLINFHISSKFSCPETGIISQGPSSDT

SEQ ID NO: 836 - protein, 221 aa, Homo sapiens
  SITE (206): Xaa equals any of the naturally occurring L-amino acids
KSWVAAEKMYHTHRRRRLVRKRKKDLTQTASSTARAMEELQDQEGWEYASLIGWKFHWKQRSSDTFRRRRWRRKMAPSETHGAAAIFKLEGALGADTTEDGDEKSLEKQKHSATTVFGANTPIVSCNFDRVYIYHLRCYVYQARNLLALDKDSFSDPYAHICFLHRSKTTEIIHSTLNPTWDQTIIFDEVEIYGEPKQFYRIHPKXSWNFLTMTKWAKMNF

SEQ ID NO: 837 - protein, 232 aa, Homo sapiens
  SITE (14): Xaa equals any of the naturally occurring L-amino acids
  SITE (72): Xaa equals any of the naturally occurring L-amino acids
  SITE (73): Xaa equals any of the naturally occurring L-amino acids
ILAHFRDRGQFCLXYESAMTRLFLEDRTETVRSCRREACNFVRAMEDKEKTDPQCLALFRVAVDKHQALLKXXMSGQGVDRHLFALYIVSRFLHLQSPFLTQVHSEQWQLSTSQIPVQQMHLFDVHNYPDYVSSGGGFGPADDHGYGVSYIFMGDGMITFHISSKKSSTKTDSHRLGQHIEDALLDVASLFQAGQHFKRRFRGSGKENSRHRCGFLSRQTGASKASMTSTDF

SEQ ID NO: 838 - protein, 142 aa, Homo sapiens
  SITE (29): Xaa equals any of the naturally occurring L-amino acids
LCPAHVMGSCPQVHLEQWQLSTSQIPVQXMHLFDVHNYPDYVSSGGGFGPADDHGYGVSYIFMGDGMITFHISSKKSSTKTDSHRLGQHIEDALLDVASLFQAGQHFKRRFRGSGKENSRHRCGFLSRQTGASKASMTSTDF

SEQ ID NO: 839 - protein, 371 aa, Homo sapiens
QGASEGHSGPKPYPRLPAWEKGEPERRGRSATGRAKEPLSRATETGEARGQDGSGRRGPQKRGVRVLRPSTAELVPARSPSETLAYQHLPVRIFVALFDYDPVSMSPNPDAGEEELPFREGQILKVFGDKDADGFYQGEGGGRTGYIPCNMVAEVAVDSPAGRQQLLQRGYLSPDILLEGSGNGPFVYSTAHTTGPPPKPRRSKKAESEGPAQPCPGPPKLVPSADLKAPHSMVGAFDYNPQESSPNMDVEAELPFRAGDVITVFGGMDDDGFYYGELNGQRGLVPSNFLEGPGPEAGGLDREPRTPQAESQDWGCTTQGSPGPPGGPCTPSSGSAPRIERGEPQGRSEKVWGFFSKGKQLLRRLGSGKKE

SEQ ID NO: 840 - protein, 444 aa, Homo sapiens
  SITE (396): Xaa equals any of the naturally occurring L-amino acids
  SITE (409): Xaa equals any of the naturally occurring L-amino acids
  SITE (411): Xaa equals any of the naturally occurring L-amino acids
  SITE (413): Xaa equals any of the naturally occurring L-amino acids
  SITE (434): Xaa equals any of the naturally occurring L-amino acids
  SITE (443): Xaa equals any of the naturally occurring L-amino acids
CRNSARAGQGHVLSPLGVPPGTDMPASQPIDIPDAKKRGKKKKRGRATDSFSGRFEDVYQLQEDVLGEGAHARVQTCINLITSQEYAVKIIEKQPGHIRSRVFREVEMLYQCQGHRNVLELIEFFEEEDRFYLVFEKMRGGSILSHIHKRRHFNELEASVVVQDVASALDFLHNKGIAHRDLKPENILCEHPNQVSPVKICDFDLGSGIKLNGDCSPISTPELLTPCGSAEYMAPEVVEAFSEEASIYDKRCDLWSLGVILYILLSGYPPFVGRCGSDCGWDRGEACPACQNMLFESIQEGKYEFPDKDWAHISCAAKDLISKLLVRDAKQRLSAAQVLQHPWVQGCAPENTLPTPMVLQRNSCAKDLTSFAAEAIAMNRQLAQHDEDLLRGGRRXKASPSWSELPHAXCXLXSNLPSPKAWRNGRQKGPKSLXFGPPMGPLXG

SEQ ID NO: 841 - protein, 212 aa, Homo sapiens
AGARRRWRGGDPAGITRGLPDPAKMQSTSNHLWLLSDILGQGATANVFRGRHKKTGDLFAIKVFNNISFLRPVDVQMREFEVLKKLNHKNIVKLFAIEEETTTRHKVLIMEFCPCGSLYTVLEEPSNAYGLPESEFLIVLRDVVGGMNHLRENGIVHRDIKPGNIMRVIGEDGQSVYKLTDFGAARELEDDEQFVSLYGTEEYLHPDMYERA

SEQ ID NO: 842 - protein, 172 aa, Homo sapiens
LEEYQALTFLTRNEILCIHDTFLKLCPPGKYYKEATLTMDQVSSLPALRVNPFRDRICRVFSHKGMFSFEDVLGMASVFSEQACPSLKIEYAFRIYDFNENGFIDEEDLQRIILRLLNSDDMSEDLLMDLTNHVLSESDLDNDNMLSFSEFEHAMAKSPDFMNSFRIRFWGC

SEQ ID NO: 843 - protein, 160 aa, Homo sapiens
  SITE (134): Xaa equals any of the naturally occurring L-amino acids
  SITE (135): Xaa equals any of the naturally occurring L-amino acids
  SITE (136): Xaa equals any of the naturally occurring L-amino acids
  SITE (140): Xaa equals any of the naturally occurring L-amino acids
  SITE (141): Xaa equals any of the naturally occurring L-amino acids
NSAQVDRSHQDPEEHPSYARQGQIEVSILARLSTESADDYNFVRAYECFQHKNHTCLVFEMLEQNLYDFLKQNKFSPLPLKYIRPVLQQVATALMKLKSLGLIHADLKPENIMLVDPSRQPYRVKVIDFGSASXXXKAVXXTYLQSRYYRALRSSWFTIL

SEQ ID NO: 844 - protein, 335 aa, Homo sapiens
QPLVSSHLGIRLTSKMPQLLQNINGIIEAFRRYARTEGNCTALTRGELKRLLEQEFADVIVKPHDPATVDEVLRLLDEDHTGTVEFKEFLVLVFKVAQACFKTLSESAEGACGSQESGSLHSGASQELGEGQRSGTEVGRAGKGQHYEGSSHRQSQQGSRGQNRPGVQTQGQATGSAWVSSYDRQAESQSQERISPQIQLSGQTEQTQKAGEGKRNQTTEMRPERQPQTREQDRAHQTGETVTGSGTQTQAGATQTVEQDSSHQTGRTSKQTQEATNDQNRGTETHGQGRSQTSQAVTGGHAQIQAGTHTQTPTQTVEQDSSHQTGSTSTQTQED

SEQ ID NO: 845 - protein, 187 aa, Homo sapiens
PAPLSDPLSRGRCQMSTMGNEASYPAEMCSHFDNDEIKRLGRRFKKLDLDKSGSLSVEEFMSLPELRHNPLVRRVIDVFDTDGDGEVDFKEFILGTSQFSVKGDEEQKLRFAFSIYDMDKDGYISNGELFQVLKMMVGNNLTDWQLQQLVDKTIIILDKDGDGKISFEEFSAVVRDLEIHKKLVLIV

SEQ ID NO: 846 - protein, 287 aa, Homo sapiens
HEFAFFAVEMVVKMVALGIFGKKCYLGDTWNRLDFFIVIAGMLEYSLDLQNVSFSAVRTVRVLRPLRAINRVPSMRILVTLLLDTLPMLGNVLLLCFFVFFIFGIVGVQLWAGLLRNRCFLPENFSLPLSVDLERYYQTENEDESPFICSQPRENGMRSCRSVPTLRGDGGGGPPCGLDYEAYNSSSNTTCVNWNQYYTNCSAGEHNPFKGAINFDNIGYAWIAIFQVITLEGWVDIMYFVMDAHSFYNFIYFILLIIVSDSSDPRGDGRSWGHLWGQSREGIVCSV

SEQ ID NO: 847 - protein, 756 aa, Homo sapiens
KEESWHIHFFEYGRGVCMYRTAKTRALVLKGIPESLRGELWLLFSGAWNEMVTHPGYYAELVEKSTGKYSLATEEIERDLHRSMPEHPAFQNELGIAALRRVLTAYAFRNPTIGYCQAMNIVTSVLLLYGSEEEAFWLLVALCERMLPDYYNTRVVGALVDQGIFEELTRDFLPQLSEKMQDLGVISSISLSWFLTLFLSVMPFESAVVIVDCFFYEGIKVILQVALAVLDANMEQLLGCSDEGEAMTMLGRYLDNVVNKQSVSPPIPHLRALLSSSDDPPAEVDIFELLKVSYEKFSSLRAEDIEQMRFKQRLKVIQSLEDTAKRSVVRAIPVDIGFSIEELEDLYMVFKAKHLASQYWGCSRTMAGRRDPSLPYLEQYRIDASQFRELFASLTPWACGSHTPLLAGRMFRLLDENKDSLINFKEFVTGMSGMYHGDLTEKLKVLYKLHLPPALSPEEAESALEAAHYFTEDSSSEEALPQEEQEGSGSEERGEEKGTSSPDYRHYLRMWAKEKEAQKETIKDLPKMNQEQFIELCKTLYNMFSEDPMEQDLYHAIATVASLLLRIGEVGKKFSARTGRKPRDCATEEDEPPAPELHQDAARELQPPAAGDPQAKAGGDTHLGTAPQESQVVVEGGSGEGQGSPSQLLSDDETKDDMSMSSYSVVSTGSLQCEDLADDTVLVGGEACSPTARIGGTVDTDWCISFEQILASILTESVLVNFFEKRVDIGLKIKDQKKVERQFSTASDHEQPGVSG

SEQ ID NO: 848 - protein, 179 aa, Homo sapiens
ARLSQVPPSPDDLPSRGLLALSLKYVPAGSEGAGLPPSGELHFWVKEARDLLPLRAGSLDTYVQCFVLPDDSRASRQRTRVVRRSLSPVFNHTMVYDGFGPADLRQACAELSLWDHGALANRQLGGTRLSLGTGSSYGLQVPWMDSTPEEKQLWQALLEQPCEWVDGLLPLRTNLAPRT

SEQ ID NO: 849 - protein, 191 aa, Homo sapiens
  SITE (160): Xaa equals any of the naturally occurring L-amino acids
  SITE (179): Xaa equals any of the naturally occurring L-amino acids
  SITE (191): Xaa equals any of the naturally occurring L-amino acids
QRVAAPGSLHNPVASLSSPSTSGQGRAEKATMATLLSHPQQRPPFLRQAIKIRRRRVRDLQDPPPQMAPEIQPPSHHFSPEQRALLYEDALYTVLHRLGHPEPNHVTEASELLRYLQEAFHVEPEEHQQTLQRVRELEKPIFCLKATVKQAKGILGKDVXGFSDPYCLLGIEQGVSVPXGSPGSRHRRRLX

SEQ ID NO: 850 - protein, 196 aa, Homo sapiens
GSTHASDEKKRQKKKSYKNSGVISVKQCEITVECTFLDYIMGGCQLNFTVGVDFTGSNGDPRSPDSLHYISPNGVNEYLTALWSVGLVIQDYDADKMFPAFGFGAQIPPQWQVSHEFPMNFNPSNPYCNGIQGIVEAYRSCLPQIKLYGPTNFSPIINHVARFAAAATQQQTASQYFVLLIITDGVITDLMKPDKL

SEQ ID NO: 851 - protein, 143 aa, Homo sapiens
  SITE (19): Xaa equals any of the naturally occurring L-amino acids
  SITE (83): Xaa equals any of the naturally occurring L-amino acids
GPHPPGCRSFFPLLTYFFXGGVHQMVPGTFAVISILVGNICLQLAPESKFQVFNNATNESYVDTAAMEAERLHVSATLACLTXIIQMGLGFMQFGFVAIYLSESFIRGFMTAAGLQILISVLKYIFGAGQEPTHSWPRSIAFL

SEQ ID NO: 852 - protein, 185 aa, Homo sapiens
GKACQSPAAFPVYTLGISRQVPWKAPARHCLSCSRTKVSLLPAPSPAGSELCSPSPGSGSFGEEPPAPQYTGPFCGRARVHTDFTPSPYDHDSLKLQVRSASGLLWSLAGCAQKGSWTEPGYDSVSGGQGPPYPLSLAPFSSPLPQQKGDVIQIIEKPPVGTWLGLLNGKVGSFKFIYVDVLPEE

SEQ ID NO: 853 - protein, 157 aa, Homo sapiens
  SITE (22): Xaa equals any of the naturally occurring L-amino acids
  SITE (32): Xaa equals any of the naturally occurring L-amino acids
VTLTAAEALKLFKNQLSPYEQXGILGYAELWXLGLEAKKLDTAPEKFSKTSFDDEHGFYLKVLHDHIAYRYEVLETIGKGSFGQVAKCLDHKNNELVALKIIRNKKRFHQQALMELKILEALRKKDKDNTYNVVHMKDFFYFRNHSASPLSSWGSIV

SEQ ID NO: 854 - protein, 210 aa, Homo sapiens
ARGGCSGPSASSSAMGSRSSHAAVIPDGDSIRRETGFSQASLLRLHHRFRALDRNKKGYLSRMDLQQIGALAVNPLGDRIIESFFPDGSQRVDFPGFVRVLAHFRPVEDEDTETQDPKKPEPLNSRRNKLHYAFQLYDLDRDGKISRHEMLQVLRLMVGVQVTEEQLENIADRTVQEADEDGDGAVSFVEFTKSLEKMDVEQKMSIRILK

SEQ ID NO: 855 - protein, 113 aa, Homo sapiens
DEFVLRLEGVIEKVNWDQDPKPALVTKFMENGSLSGLLQSQCPRPWPLLCRLLKEVVLGMFYLHDQNPVLLHRDLKPSNVLLDPELHVKVSWSTPLSASRQGPRAALARPAGH

SEQ ID NO: 856 - protein, 407 aa, Homo sapiens
GTRANPDPTTSMSATDRMGPRAVPGLRLALLLLLVLGTPKSGVQGQEGLDFPEYDGVDRVINVNAKNYKNVFKKYEVLALLYHEPPEDDKASQRQFEMEELILELAAQVLEDKGVGFGLVDSEKDAAVAKKLGLTEVDSMYVFKGDEVIEYDGEFSADTIVEFLLDVLEDPVELIEGERELQAFENIEDEIKLIGYFKSKDSEHYKAFEDAAEEFHPYIPFFATFDSKVAKKLTLKLNEIDFYEAFMEEPVTIPDKPNSEEEIVNFVEEHRRSTLRKLKPESMYETWEDDMDGIHIVAFAEEADPDGFEFLETLKAVAQDNTENPDLSIIWIDPDDFPLLVPYWEKTFDIDLSAPQIGVVNVTDADSVWMEMDDEEDLPSAEELEDWLEDVLEGEINTEDDDDDDDD

SEQ ID NO: 857 - protein, 721 aa, Homo sapiens
  SITE (123): Xaa equals any of the naturally occurring L-amino acids
  SITE (358): Xaa equals any of the naturally occurring L-amino acids
  SITE (485): Xaa equals any of the naturally occurring L-amino acids
APLIPATSNRESVKSEDGDDEEPPYRGPFCGRARVHTDFTPSPYDTDSLKLKKGDIIDIISKPPMGTWMGLLNNKVGTFKFIYVDVLSEDEEKPKRPTRRRRKGRPPQPKSVEDLLDRINLKXHMPTFLFNGYEDLDTFKLLEEEDLDELNIRDPEHRAVLLTAVELLQEYDSNSDQSGSQEKLLVDSQGLSGCSPRDSGCYESSENLENGKTRKASLLSAKSSTEPSLKSFSRNQLGNYPTLPLMKSGDALKQGQEEGRLGGGLAPDTSKSCDPPGVTGLNKNRRSLPVSICRSCETLEGPQTVDTWPRSHSLDDLQVEPGAEQDVPTEVTEPPPQIVPEVPQKTTASSTKAQPLEXDSAVDNALLLTQSKRFSEPQKLTTKKLEGSIAASGRGLSPPQCLPRNYDAQPPGAKHGLARTPLEGHRKGHEFEGTHHPLGTKEGVDAEQRMQPKIPSQPPPVPAKKSRERLANGLHPVPMGPSGAXPSPDAPCLPVKRGSPASPTSPSDCPPALAPRPLSGQAPGSPPSTRPPPWLSELPENTSLQEHGVKLGPALTRKVSCARGVDLETLTENKLHAEGIDLTEEPYSDKHGRCGIPEALVQRYAEDLDQPERDVAANMDQIRVKQLRKQHRMAIPSGGLTEICRKPVSPGCISSVSDWLISIGLPMYAGTLSTAGFSTLSQVPSLSHTCLQEAGITEERHIRKLLSAARLFKLPPGPEAM

SEQ ID NO: 858 - protein, 257 aa, Homo sapiens
GDEKRRWTLDLESRYDTKKLFQGKDIYEMNLSQWKVMERIKSCGLEEQESPHEVCFRQVTKTTSEKMPTYRKLTSLPLYQKSHNREKPYECGECGKAFRVRQQLTFHQRIHTGEKPYECKECGKAFRQCAHLSRHQRIHTSDKLYECKKCGKIFTCGSDLRVHQRIHIGEKPYECKECGKAFRVRGQLNLHQRIHTGEKPYECKECGKAFRQYAHLTRHQRLNIAEKCYECKECGQAFLCSTGLRLHHKLHTGEKKK

SEQ ID NO: 859 - protein, 134 aa, Homo sapiens
PSWGRSPRKIDQFCNSRNMVHGSVTFRDVAIDFSQEEWECLQPDQRTLYRDVMLENYSHLISLGSSISKPDVITLLEQEKEPWIVVSKETSRWYPDLESKYGPEKISPENDIFEINLPKHVIKQISKTKKKKKK

SEQ ID NO: 860 - protein, 398 aa, Homo sapiens
EPGKRTLLAVGNCRVMPQVTFNDVAIDFTHEEWGWLSSAQRDLYKDVMVQNYENLVSVGLSVTKPYVITLLEDGKEPWMMEKKLSKGMIPDWESRWENKELSTKKDNYDEDSPQTVIIEKVVKQSYEFSNSKKNLEYIEKLEGKHGSQVDHFRPAILTSRESPTADSVYKYNIFRSTFHSKSTLSEPQKISAEGNSHKYDILKKNLPKKSVIKNEKVNGGKKLLNSNKSGAAFSQGKSLTLPQTCNREKIYTCSECGKAFGKQSILNRHWRIHTGEKPYECRECGKTFSHGSSLTRHLISHSGEKPYKCIECGKAFSHVSSLTNHQSTHTREKPYECMNCGKSFSRVSHLIEHLRIHTQEKLYECRICGKAFIHRSSLIHHQKIHTGEKPYECRKFRN

SEQ ID NO: 861 - protein, 121 aa, Homo sapiens
GGDSWQVLDHSKRWWLVKNEAGRSGYIPSNILEPLQPGTPGTQGQSPSRVPMLRLSSRPEEVTDWLQAENFSTATVRTLGSLTGSQLLRIRPGELQMLCPQEAPRILSRLEAVRRMLGISP

SEQ ID NO: 862 - protein, 185 aa, Homo sapiens
VDPRVRSTLRIPGPCFPSEKTHNHDPQPGDPNSRPSSPKPAQPALKMQVLYEFEARNPRELTVVQGEKLEVLDHSKRWWLVKNEAGRSGYIPSNILEPLQPGTPGTQGQSPSRVPMLRLSSRPEEVTDWLQAENFSTATVRTLGSLTGSQLLRIRPGELQMLCPQEAPRILSRLEAVRRMLGISP

SEQ ID NO: 863 - protein, 404 aa, Homo sapiens
  SITE (106): Xaa equals any of the naturally occurring L-amino acids
  SITE (137): Xaa equals any of the naturally occurring L-amino acids
WIPRAAGIRHEVEVQDLKLSVHKSQQNDCANKENIVNSFTDKQQTPEKLPIPMIAKNLMCELDEDCEKNSKRDYLSSSFLCSDDDRASKNISMNSDSSFPGISIMXSPLESQPLDSDRSIKESSFEESNIEDPLIVXPDCQEKTSPKGVENPAVQESNQKMLGPPLEVLKTLASKRNAVAFRSFNSHINASNNSEPSRMNMTSLDAMDISCAYSGSYPMAITPTQKRRSCMPHQTPNQIKSGTPYRTPKSVRRGVAPVDDGRILGTPDYLAPELLLGRAHGPAVDWWALGVCLFEFLTGIPPFNDETPQQVFQNILKRDIPWPEGEEKLSDNAQSAVEILLTIDDTKRAGMKELKRHPLFSDVDWENLQHQTMPFIPQPDDETDTSYFEARNTAQHLTVSGFSL

SEQ ID NO: 864 - protein, 319 aa, Homo sapiens
EGIEELSDPSGPKSYSITEKHYAQEDPRMLFVAAVDHSSSGDMSLLPSSDPKFQGLGVVESAVTANNTEESFRICSPLSGANEYIASTDTLKTEEVLLFTDQTDDLAKEEPTSLFQRDSETKGESGLVLEGDKEIHQIFEDLDKKLALASRFYIPEGCIQRWAAEMVVALDALHREGIVCRDLNPNNILLNDRGHIQLTYFSRWSEVEDSCDSDAIERMYCAPEVGAITEETEACDWWSLGAVLFELLTGKTLVECHPAGINTHTTLNMPECVSEEARSLIQQLLQFNPLERLGAGVAGVEDIKSHPFFTPVDWAELMR

SEQ ID NO: 865 - protein, 274 aa, Homo sapiens
QSGLQHEGIFRVSGSQVEVNDIKNAFERGEDPLAGDQNDHDMDSIAGVLKLYFRGLEHPLFPKDIFHDLMACVTMDNLQERALHIRKVLLVLPKTTLIIMRYLFAFLNHLSQFSEENMMDPYNLAICFGPSLMSVPEGHDQVSCQAHVNELIKTIIIQHENIFPSPRELEGPVYSRGGSMEDYCDSPHGETTSVEDSTQDVTAEHHTSDDECEPIEAIAKFDYVGRTARELSFKKGASLLLYQRASDDWWEGRHNGIDGLIPHQYIVVQDTLIS

SEQ ID NO: 866 - protein, 93 aa, Homo sapiens
RKICIISIIFMYRKLNSVHLTQFSGKFFSLCLFELGDTSHRLRTQDIATPVTADLIVSVIVIGPDSFHQLSQSAFVFRVHLCEGDSGAGLPVD

SEQ ID NO: 867 - protein, 724 aa, Homo sapiens
  SITE (27): Xaa equals any of the naturally occurring L-amino acids
  SITE (154): Xaa equals any of the naturally occurring L-amino acids
  SITE (365): Xaa equals any of the naturally occurring L-amino acids
DPGVWLPPSRDPAMAKRSSLYIRIVEXKNLPAKDITGSSDPYCIVKVDNEPIIRTATVWKTLCPFWGEEYQVHLPPTFHAVAFYVMDEDALSRDDVIGKVCLTRDTIASHPKGFSGWAHLTEVDPDEEVQGEIHLRLEVWPGARACRLRCSVLXARDLAPKDRNGTSDPFVRVRYKGRTRETSIVKKSCYPRWNETFEFELQEGAMEALCVEAWDWDLVSRNDFLGKVVIDVQRLRVVQQEEGWFRLQPDQSKSRRHDEGNLGSLQLEVRLRDETVLPSSYYQPLVHLLCHEVKLGMQGPGQLIPLIEETTSTECRQDVATNLLKLFLGQGLAKDFLDLLFQLELSRTSETNTLFRSNSLASKSXESFLKVAGMQYLHGVLGPIINKVFEEKKYVELDPSKVEVKDVGCSGLHRPQTEAEVLEQSAQTLRAHLGALLSALSRSVRACPAVVRATFRQLFRRVRERFPGAQHENVPFIAVTSFLCLRFFSPAIMSPKLFHLRERHADARTSRTLLLLAKAVQNVGKMDTPASRAKEAWMEPLQPTVRQGVAQLKDFITKLVDIEEKDELDLQRTLSLQAPPVKEGPLFIHRTKGKGPLMSSSFKKLYFSLTTEALSFAKTPSSKKSALIKLANIRAAEKVEEKSFGGSHVMQVIYTDDAGRPQTAYLQCKCVNELNQWLSALRKVSINNTGLLGSYHPGVFRGDKWSCCHQKEKTGQGCDKTRSR

SEQ ID NO: 868 - protein, 61 aa, Homo sapiens
  SITE (37): Xaa equals any of the naturally occurring L-amino acids
RTATVWKTLCPFWGEEYQVHLPPTFHAVAFYVMDEDXLSRDDVIGKVCLTRDTIASHPKGF

SEQ ID NO: 869 - protein, 183 aa, Homo sapiens
RTPTTLREASDPATPSNFLPKKTPLGEEMTPPPKPPRLYLPQEPTSEETPRTKRPHMEPRTRRGPSPPASPTRKPPRLQDFRCLAVLGRGHFGKVLLVQFKGTGKYYAIKALKKQEVLSRDEIESLYCEKRILEAVGCTGHPFLLSLLACFQTSSHACFVTEFVPGGDLMMQIHGGCLPRAPG

SEQ ID NO: 870 - protein, 214 aa, Homo sapiens
FCFSCFLVHVKKYLCLLYNCVYLIFLTVLIDSIYKVTEGRQSEIFHRQAEGNFDPSCCFTIYHGNHMESLDLITSNPEEARTWITGLKYLMAGISDEDSLAKRQRTHDQWVKQTFEEADKNGDGLLNIEEIHQLMHKLNVNLPRRKVRQMFQEADTDENQGTLTFEEFCVFYKMMSLRRDLYLLLLSYSDKKDHLTVEELAQFLKVEQKVSLDC

SEQ ID NO: 871 - protein, 105 aa, Homo sapiens
DVVDPYVYVEIHGIPADCAEQRTKTVHQNGDAPIFDESFEFQINLPELAMVRFVVLDDDYIGDEFIGQYTIPFECLQTGYRHVPLQSLTGEVLAHASLFVHVAIT

SEQ ID NO: 872 - protein, 316 aa, Homo sapiens
  SITE (1): Xaa equals any of the naturally occurring L-amino acids
  SITE (308): Xaa equals any of the naturally occurring L-amino acids
XLDPKCRGLPFSSFLILPFQRITRLKLLVQNILKRVEERSERECTALDAHKELEMVVKACNEGVRKMSRTEQMISIQKKMEFKIKSVPIISHSRWLLKQGELQQMSGPKTSRTLRTKKLFHEIYLFLFNDLLVICRQIPGDKYQVFDSAPRGLLRVEELEDQGQTLANVFILRLLENADDREATYMLKASSQSEMKRWMTSLAPNRRTKFVSFTSRLLDCPQVQCVHPYVAQQPDELTLELADILNILDKTDDGWIFGERLHDQERGWFPSSMTEEILNPKIRSQNLKECFRVHKMDDPQRSQNKDRXKLGSRNRQ

SEQ ID NO: 873 - protein, 1139 aa, Homo sapiens
ARGVPVECPQPEKIPNGIIDVQGLAYLSTALYTCKPGFELVGNTTTLCGENGHWLGGKPTCKAIECLKPKEILNGKFSYTDLHYGQTVTYSCNRGFRLEGPSALTCLETGDWDVDAPSCNAIHCDSPQPIENGFVEGADYSYGAIIIYSCFPGFQVAGHAMQTCEESGWSSSIPTCMPIDCGLPPHIDFGDCTKLKDDQGYFEQEDDMMEVPYVTPHPPYHLGAVAKTWENTKESPATHSSNFLYGTMVSYTCNPGYELLGNPVLICQEDGTWNGSAPSCISIECDLPTAPENGFLRFTETSMGSAVQYSCKPGHILAGSDLRLCLENRKWSGASPRCEAISCKKPNPVMNGSIKGSNYTYLSTLYYECDPGYVLNGTERRTCQDDKNWDEDEPICIPVDCSSPPVSANGQVRGDEYTFQKEIEYTCNEGFLLEGARSRVCLANGSWSGATPDCVPVRCATPPQLANGVTEGLDYGFMKEVTFHCHEGYILHGAPKLTCQSDGNWDAEIPLCKPVNCGPPEDLAHGFPNGFSFIHGGHIQYQCFPGYKLHGNSSRRCLSNGSWSGSSPSCLPCRCSTPVIEYGTVNGTDFDCGKAARIQCFKGFKLLGLSEITCEADGQWSSGFPHCEHTSCGSLPMIPNAFISETSSWKENVITYSCRSGYVIQGSSDLICTEKGVWSQPYPVCEPLSCGSPPSVANAVATGEAHTYESEVKLRCLEGYTMDTDTDTFTCQKDGRWFPERISCSPKKCPLPENITHILVHGDDFSVNRQVSVSCAEGYTFEGVNISVCQLDGTWEPPFSDESCSPVSCGKPESPEHGFVVGSKYTFESTIIYQCEPGYELEGNRERVCQENRQWSGGVAICKETRCETPLEFLNGKADIENRTTGPNVVYSCNRGYSLEGPSEAHCTENGTWSHPVPLCKPNPCPVPFVIPENALLSEKEFYVDQNVSIKCREGFLLQGHGIITCNPDETWTQTSAKCEKISCGPPAHVENAIARGVHYQYGDMITYSCYSGYMLEGFLRSVCLENGTWTSPPICRAVCRFPCQNGGICQRPNACSCPEGWMGRLCEEPICILPCLNGGRCVAPYQCDCPPGWTGSRCHTAVCQSPCLNGGKCVRPNRCHCLSSWTGHNCSRKRRTGF

SEQ ID NO: 874 - protein, 204 aa, Homo sapiens
GTREQYVVVANYQKQESSEISLSVGQVVDIIEKNESGWWFVSTAEEQGWVPATCLEGQDGVQDEFSLQPEEEEKYTVIYPYTARDQDEMNLERGAVVEVIQKNLEGWWKIRYQGKEGWAPASYLKKNSGEPLPPKPGPGSPSHPGALDLDGVSRQQNAVGREKELLSSQRDGRFEGRPVPDGDAKQRSPKMRQRPPPRRDMTIP

SEQ ID NO: 875 - protein, 237 aa, Homo sapiens
QKKKKMMYLTTRNAEFDRHEIQIYEEVAKMPPFQRKTLVLIGAQGVGRRSLKNRFIVLNPTRFGTTVPFTSRKPREDEKDGQAYKFVSRSEMEADIKAGKYLEHGEYEGNLYGTKIDSILEVVQTGRTCILDVNPQALKVLRTSEFMPYVVFIAAPELETLRAMHKAVVDAGITTKLLTDSDLKKTVDESARIQRAYNHYFDLIIINDNLDKAFEKLQTAIEKLRMEPQWVPISWVY

SEQ ID NO: 876 - protein, 372 aa, Homo sapiens
  SITE (232): Xaa equals any of the naturally occurring L-amino acids
  SITE (254): Xaa equals any of the naturally occurring L-amino acids
  SITE (320): Xaa equals any of the naturally occurring L-amino acids
  SITE (342): Xaa equals any of the naturally occurring L-amino acids
  SITE (352): Xaa equals any of the naturally occurring L-amino acids
QRRGASPGVSRASARFWSVALPARAQPGPRMASTTTCTRFTDEYQLFEELGKGAFSVVRRCMKIPTGQEYAAKIINTKKLSARDHQKLEREARICRLLKHPNIVRLHDSISEEGFHYLVFDLVTGGELFEDIVAREYYSEADASHCIQQILESVNHCHLNGIVHRDLKPENLLLASKSKGAAVKLADFGLAIEVQGDQQAWFGFAGTPGYLSPEVLRKDPYGKPVDMWACGXILYILLVGYPPFWDEDQHRLYXQIKAGAYDFPSPEWDTVTPEAKDLINKMLTINPAKRITASEALKHPWICQRSTVASMMHRQETVDXLKKFNARRKLKGAILTTMLATXNFSAAKSLLXKPDGVKESTESQIQQLRMKM

SEQ ID NO: 877 - protein, 190 aa, Homo sapiens
  SITE (138): Xaa equals any of the naturally occurring L-amino acids
  SITE (152): Xaa equals any of the naturally occurring L-amino acids
  SITE (166): Xaa equals any of the naturally occurring L-amino acids
  SITE (177): Xaa equals any of the naturally occurring L-amino acids
  SITE (181): Xaa equals any of the naturally occurring L-amino acids
  SITE (182): Xaa equals any of the naturally occurring L-amino acids
GPYSGPFCGRARVHTDFTPSPYDTDSLKIKKGDIIDIICKTPMGMWTGMLNNKVGNFKFIYVDVISEEEAAPKKIKANRRSNSKKSKTLQEFLERIHLQEYTSTLLLNGYETLEDLKDIKESHLIELNIENPDDRRRXLSAAENFLEEESKXVHLLFSPADNQFNXNSIIIRNKAPXLFTXXMKARFPIK

SEQ ID NO: 878 - protein, 169 aa, Homo sapiens
  SITE (2): Xaa equals any of the naturally occurring L-amino acids
  SITE (17): Xaa equals any of the naturally occurring L-amino acids
  SITE (18): Xaa equals any of the naturally occurring L-amino acids
  SITE (24): Xaa equals any of the naturally occurring L-amino acids
  SITE (33): Xaa equals any of the naturally occurring L-amino acids
  SITE (50): Xaa equals any of the naturally occurring L-amino acids
GXMAKECHDPSNEELEXXRWAAFXQCPVMALYXSLNADTEREEGEEFEDXMDVFDDSSSSPSGTLRNYPLTCKVVYSYKASQPDELTIEEHEVLEVIEDGDMEDWVKARNKVGQVGYVPEKYLQFPTSNSLLSMLQSLAALDSRSHTSSNSTEAELVSGSLNGDASGKD

SEQ ID NO: 879 - protein, 156 aa, Homo sapiens
QHEEQILDHLNPKTTQLLVAMGFQAENLSVAIKEKLFSYPMATYLVLEQTKQKKRSTIRPQTLPPGDPTCPLYIEVSTFPLSLKRAHSIQQKTVGAKSGQGLCPWESCFRPSSTTWPWPLLCPVCACSHGAQSGPTRRHQNDCPCVYSLAPSPHGG

SEQ ID NO: 880 - protein, 273 aa, Homo sapiens
STHASADAWAAASRVGSNRSRARAGGGAMACAGLLTVCLLRPPAPQPQPQTPRHPQLAPDPGPAGHTLFQDVFRRADKNDDGKLSFEEFQNYFADGVLSLGELQELFSGIDGHLTDNLETEKLCDYFSEHLGVYRPVLAALESLNRAVLAAMDATKLEYERASKVDQFVTRFLLRETVSQLQALQSSLEGASDTLEAQAHGWRSDAESVEAQSRLCGSRRAGRRALRSVSRSSTWSPGSSDTGRSSQAEMQWRLQVNRLQELIDQLECKAPRL

SEQ ID NO: 881 - protein, 259 aa, Homo sapiens
  SITE (1): Xaa equals any of the naturally occurring L-amino acids
XLLQGTIRWSSTAVAAALELVDPPGCRNSPGEYPTLQKDFRRTTYANSSLIKYMEKHKVKPDSKVFLLLQKLLTMDPTKRITSEQALQDPYFQEDPLPTLDVFAGCQIPYPKREFLNEDDPEEKGDKNQQQQQNQHQQPTAPPQQAAAPPQAPPPQQNSTQTNGTAGGAGAGVGGTGAGLQHSQDSSLNQVPPNKKPRLGPSGANSGGPVMPSDYQHSSSRLNYQSSVQGSSQSQSTLGYSSSSQQSSQYHPSHQAHRY

SEQ ID NO: 882 - protein, 451 aa, Homo sapiens
  SITE (296): Xaa equals any of the naturally occurring L-amino acids
  SITE (325): Xaa equals any of the naturally occurring L-amino acids
HRWPETPPFSYTCGDPSTYRVTFPVCPQKLSLAPPSAKASPHNPGSCGEPQAKFLEAFFEEPPRRQSPVSNLGSEGECPSSGAGSQAQELAEAWEGCRKDLLFQKSPQNHRPPSVSDQTGEKENCYQHMGTSKSPAPGFIHLRTECGPRKEPCQEKAALERVLRQKQDAQGFTPPQLGASQQYASDFHNVLKEEQEALCLDLWGTERREERREPEPHSRQGQALGVKRGCQLHEPSSALCPAPSAKVIKMPRGGPQQLGTGANTPARVFVALSDYNPLVMSANLKAAEEELVFQKXQLLRVWGSQDTHDFYLSECNRQVGNIPGXLVAEMEVGTEQTDRRWRSPAQGHLPSVAHLEDFQGLTIPQGSSLVLQGNSKRLPLWTPKIMIAALDYDPGDGQMGGQGKGRLALRAGDVVMVYGPMDDQGFYYGELGGHRGLVPAHLLDHMSLHGH

SEQ ID NO: 883 - protein, 283 aa, Homo sapiens
HASADAWADAWADAWVSPVSRQSIRNSQKHSPTSEPTPPGDALPPVSSPHTHRGYQPTPAMAKYVKILYDFTARNANELSVLKDEVLEVLEDGRQWWKLRSRSGQAGYVPCNILGEARPEDAGAPFEQAGQKYWGPASPTHKLPPSFPGNKDELMQHMDEVNDELIRKISNIRAQPQRHFRVERSQPVSQPLTYESGPDEVRAWLEAKAFSPRIVENLGILTGPQLFSLNKEELKKVCGEEGVRVYSQLTMQKAFLEKQQSGSELEELMNKFHSMNQRRGEDS

SEQ ID NO: 884 - protein, 335 aa, Homo sapiens
IWPAISATRIASRGASAHCRPWPYSHRRSVTTPSRRELRFWDLAPTVSEWSRLMREGKWSPRIWRGRLVWPRLRQQGAVPFLVSATSGTTVLGAFDPLEAIADVCQRHGLWLHVDAAWGGSVLLSQTHRHLLDGIQRADSVAWNPHKLLAAGLQCSALLLQDTSNLLKRCHGSQASYLFQQDKFYDVALDTGDKVVQCGRRVDCLKLWLMWKAQGDQGLERRIDQAFVLARYLVEEMKKREGFELVMEPEFVNVCFWFVPPSLRGKQESPDYHERLSKVAPVLKERMVKEGSMMIGYQPHGTRGNFFRVVVANSALTCADMDFLLNELERLGQDL

SEQ ID NO: 885 - protein, 156 aa, Homo sapiens
  SITE (126): Xaa equals any of the naturally occurring L-amino acids
  SITE (131): Xaa equals any of the naturally occurring L-amino acids
  SITE (145): Xaa equals any of the naturally occurring L-amino acids
  SITE (148): Xaa equals any of the naturally occurring L-amino acids
EPRSFLTFIVKIGAVPIIRCSRGTAAEMVAVKLDKKLRENLRDARNSLFTGDTLGAGQFSFQRPLLVLVDRNIDLATPLHHTWTYQALVHDVLGKRLNAALITGNIVTCSVPFNLKLTSWATETKXRRMGXETLEQTVMGVWVLXGCXKPGKCGSL

SEQ ID NO: 886 - protein, 106 aa, Homo sapiens
  SITE (58): Xaa equals any of the naturally occurring L-amino acids
DPRVRLTKKRVTLLILSIWAIAIFMGAVPTLGWNCLCDISACSSLAPIYSRSYLIFWXSVQPCGPFSSWLWCTWRIYMYVKRKTNVLCSTYEWVHQPPEDTHVSWM

SEQ ID NO: 887 - protein, 327 aa, Homo sapiens
  SITE (64): Xaa equals any of the naturally occurring L-amino acids
PRVRFSLEALQTIHKQMDDDKDGGIEVEESDEFIREDMKYKDATNKHSHLHREDKHITIEDLWXRWKTSEVHNWTLEDTLQWLIEFVELPQYEKNFRDNNVKGTTLPRIAVHEPSFMISQLKISDRSHRQKLQLKALDVVLFGPLTRPPHNWMKDFILTVSIVIGVGGCWFAYTQNKTSKEHVAKMMKDLESLQTAEQSLMDLQERLEKAQEENRNVAVEKQNLERKMMDEINYAKEEACRLRELREGAECELSRRQYAEQELEQVRMALKKAEKEFELRSSWSVPDALQKWLQLTHEVEVQYYNIKRQNAEMQLAIAKDEAEKKKK

SEQ ID NO: 888 - protein, 268 aa, Homo sapiens
  SITE (122): Xaa equals any of the naturally occurring L-amino acids
  SITE (250): Xaa equals any of the naturally occurring L-amino acids
  SITE (263): Xaa equals any of the naturally occurring L-amino acids
HLGEQGRSLPGWRTMLRRKPSNASEKEPTQKKKLSLQRSSSFKDFAKSKPSSPVVSEKEFNLDDNIPEDDSGVPTPEDAGKSGKKLGKKWRAVISRTMNRKMGKMMVKALSEEMADTLEEGXASPTSPDYSLDSPGPEKMALAFSEQEEHELPVLSRQHATGSELCSPSPGSGSFGEEPPAPQYTGPFCGRARVHTDFTPSPYDHDSLKLQKGDVIQIIEKPPVGTWLGLLNGKVGSFKFIYVGCAARGXRGACPPQPPTEQXQEAQA

SEQ ID NO: 889 - protein, 151 aa, Homo sapiens
  SITE (123): Xaa equals any of the naturally occurring L-amino acids
  SITE (133): Xaa equals any of the naturally occurring L-amino acids
  SITE (149): Xaa equals any of the naturally occurring L-amino acids
ITKKIFKSHLKSSRNSTSVKKKSSRNIFSIVFVFFVCFVPYHIARIPYTKSQTEAHYSCQSKEILRYMKEFTLLLSAANVCLDPIIYFFLCQPFREILCKKLHIPLKAQNDLDISRIKRGNTXLESTDTLVSXTLFQRKTTCACCHLQXHN

SEQ ID NO: 890 - protein, 213 aa, Homo sapiens
  SITE (188): Xaa equals any of the naturally occurring L-amino acids
EGAPPLCDMHPMRALFLIPRNPPPRLKSKKWSKKFFSFIEGCLVKNYMQRPSTEQLLKHPFIRDQPNERQVRIQLKDHIDRTRKKRGEKDETEYEYSGSEEEEEEVPEQEGEPSSIVNVPGESTLRRDFLRLQQENKERSEALRRQQLLQEQQLREQEEYKRQLLAERQKRIEQQKEQRRRLEEQQRXEREARRQQEREQQKKKKKKKKKSYR

SEQ ID NO: 891 - protein, 237 aa, Homo sapiens
  SITE (182): Xaa equals any of the naturally occurring L-amino acids
ARIARDLQGSPEHKTKPGKAPEKSREFSPYIDINGTCDKLTPFWFTLWSQRGKCEDQKVECLYEALKRAGDRLLGSFPTAVPLALHSSISYLGFFVSGSPADVIREFAMTFATEASLLADCSVKPCTKQLHLTLAHKFYPHHQRTLEQLARAIPLGHSCQWTAALYSRDMRFVHYQTLRALXQYKPQNVDELTLSPGDYIFVDPTQQDEASEGWVIGISQRTGCRGFLPENYTGSSQ

SEQ ID NO: 892 - protein, 551 aa, Homo sapiens
EGSPPGLAGAAAASDRCEPGPEAHGAGSGTRAACWGWLSPRPPPVKAASPPASRRTLRCHSLSSPPAASAPRPPAVPGSREPECSSGGRAECSGGCQEPEGWAGPSLLAHHPSPQAAPGVGPPFSQAPAPQLPPGPPGAPKPPPASQPSLVSTVAPGSGLAPTAQPGAPSMAGTVAPGGVSGPSPAQLGAPALGGQQSVSNKLLAWSGVLEWQEKPKPASVDANTKLTRSLPCQVYVNHGENLKTEQWPQKLIMQLIPQQLLTTLGPLFRNSRMVQFHFTNKDLESLKGLYRIMGNGFAGCVHFPHTAPCEVRVLMLLYSSKKKIFMGLIPYDQSGFVNGIRQVITNHKQVQQQKLEQQQRGMGGQQAPPGLGPILEDQARPSQNLLQLRPPQPQPQGTVGASGATGQPQPQGTAQPPPGAPQGPPGAASGPPPPGPILRPQNPGANPQLRSLLLNPPPPQTGVPPPQASLHHLQPPGAPALLPPPHQGLGQPQLGPPLLHPPPAQSWPAQLPPRAPLPGQMLLSGGPRGPVPQPGLQPSVMEDDILMDLI

SEQ ID NO: 893 - protein, 331 aa, Homo sapiens
  SITE (36): Xaa equals any of the naturally occurring L-amino acids
  SITE (158): Xaa equals any of the naturally occurring L-amino acids
ASALKQYLRSLPEPLMTYELHGDFIVPAKSGSPESXVNAIHFLVHKLPEKNKEMLDILVKHLTNVSNHSKQNLMTVANLGVVFGPTLMRPQEETVAALMDLKFQNIVVEILIENHEKIFRTPPDTTFPEPTCLSASPPNAPPRQSKRQGQRTKRPVAXYNLCLELEDGDNPYPSKEDTPTSSLDSLSSPSPVTTAVPGPPGPDKNHLLADGGSFGDWASTIPGQTRSSMVQWLNPQSPTTTSSNSAVTPLSPGSSPFPFSPPATVADKPPESIRSRKARAVYPCEAEHSSELSFEIGAIFEDVQTSREPGWLEGTLNGKRGLIPQNYVKLL

SEQ ID NO: 894 - protein, 373 aa, Homo sapiens
  SITE (128): Xaa equals any of the naturally occurring L-amino acids
  SITE (135): Xaa equals any of the naturally occurring L-amino acids
  SITE (139): Xaa equals any of the naturally occurring L-amino acids
  SITE (246): Xaa equals any of the naturally occurring L-amino acids
  SITE (315): Xaa equals any of the naturally occurring L-amino acids
GITLTKGNTSWSSTAVAAALELVDPPGCRNSARADAPKDPVPALPTHPPAQEQDCVVVITREVPHQTASDFVRDSAASHQAEPEAYERRVCFLLLQLCNGLEHLKEHGIIHRDLCLENLLLVHCTLQXGPGPAPXPDPXPAPAAAAPPCSSAAPPAGGLSVPHRPDSPEGPREKQLPRLIISNFLKAKQKPGSTPNLQQKKSQARLAPEIVSASQYRKFDEFQTGILIYELLHQPNPFEVRAQLRXRDYRQEDLPPLPALSLYSPGLQQLAHLLLEADPIKRIRIGEAKRVLQCLLWGPRRELVQQPGTSEEALXAALHNWIDMKRALMMMKFAEKAVDRRRGVELEDWLCCQYLASAEPGALLQSLKLLQLL

SEQ ID NO: 895 - protein, 178 aa, Homo sapiens
  SITE (165): Xaa equals any of the naturally occurring L-amino acids
KPENILVSQSGITKLCDFGFARTLAAPGDIYTDYVATRWYRAPELVLKDTSYGKYVYFGILSAFPRPVDIWALGCMIIEMATGNPYLPSSSDLDLLHKIVLKVGNLSPHLQNIFSKSPIFAGVVLPQVQHPKNARKKYPKLNGLLADIVHACLQIDPADRISSMXFCIMSILLEMDLL

SEQ ID NO: 896 - protein, 449 aa, Homo sapiens
  SITE (137): Xaa equals any of the naturally occurring L-amino acids
  SITE (158): Xaa equals any of the naturally occurring L-amino acids
  SITE (232): Xaa equals any of the naturally occurring L-amino acids
  SITE (271): Xaa equals any of the naturally occurring L-amino acids
  SITE (273): Xaa equals any of the naturally occurring L-amino acids
  SITE (277): Xaa equals any of the naturally occurring L-amino acids
  SITE (286): Xaa equals any of the naturally occurring L-amino acids
  SITE (294): Xaa equals any of the naturally occurring L-amino acids
  SITE (305): Xaa equals any of the naturally occurring L-amino acids
  SITE (373): Xaa equals any of the naturally occurring L-amino acids
  SITE (376): Xaa equals any of the naturally occurring L-amino acids
  SITE (394): Xaa equals any of the naturally occurring L-amino acids
  SITE (400): Xaa equals any of the naturally occurring L-amino acids
  SITE (423): Xaa equals any of the naturally occurring L-amino acids
PNLNFVIRLTIGKAGTPAGTGPEFPGRPTRPIVKLFEVIETEKTLYLVMEYASAGEVFDYLVSHGRMKEKEARAKFRQIVSAVHYCHQKNIVHRDLKAENLLLDAEANIKIADFGFSNEFTLGSKLDTFCGSPPYAXPELFQGKKYDGPEVDIWSLGXILYTLVSGSLPFDGHNLKELRERVLRGKYRVPFYMSTDCESILRRFLVLNPAKRCTLEQIMKDKWINIGYEGEXLKPYTEPEEDFGDTKRIEVMVGMGYTREEIKESLTSQKXNXVTAXYLLLGRKTXEGGDRGAXGLALARVRAPXDTTNGTSSSKGTSHSKGQRSSSSTYHRQRRHSDFCGPSPAPLHPKRSPTSTGEAELKEERLPGRKASXSTXGSGSRGLPPSSPMVSSAXNPNKAXIPERRKDSTSTPNNLPPSMMTRXNTYVCTERPGAERPSLLPNGKKKKKK

SEQ ID NO: 897 - protein, 244 aa, Homo sapiens
  SITE (39): Xaa equals any of the naturally occurring L-amino acids
LVQKKDTGHIYAMKILRKSDMLEKEQVAHIRAERDILVXADGAWVVKMFYSFQDKRNLYLIMEFLPGGDMMTLLMKKDTLTEEETQFYISETVLAIDAIHQLGFIHRDIKPDNLLLDAKGHVKLSDFGLCTGLKKAHRTEFYRNLTHNPPSDFSFQNMNSKRKAETWKKNRRQLAYSTVGTPDYIAPEVFMQTGYNKLCDWWSLGVIMYEMLIGYPPFCSETPQETYRKVMNWKETLVFPPEVP

SEQ ID NO: 898 - protein, 375 aa, Homo sapiens
ARAGTTAPPREERTGGVGGYPAVGAREDRMSHPSGPYSQASAAAPQPAAARQPPPPEEEEEEANSYDSDEATTLGALEFSLLYDQDNSSLQCTIIKAKGLKPMDSNGLADPYVKLHLLPGASKSNKLRTKTLRNTRNPIWNETLVYHGITDEDMQRKTLRISVCDEDKFGHNEFIGETRFSLKKLKPNQRKNFNICLERVIPMKRAGTTGSARGMALYEEEQVERVGDIEERGKILVSLMYSTQQGGLIVGIIRCVHLAAMDANGYSDPFVKLWLKPDMGKKAKHKTQIKKKTLNPEFNEEFFYDIKHSDLAKKSLDISVWDYDIGKSNDYIGGCQLGISAKGERLKHWYECLKNKDKKIERWHQLQNENHVSSD

SEQ ID NO: 899 - protein, 227 aa, Homo sapiens
  SITE (222): Xaa equals any of the naturally occurring L-amino acids
YLITGDSIVSAEAVWDHVTMANRELAFKAGDVIKVLDASNKDWWWGQIDDEEGWFPASFVRLWVNQEDEVEEGPSDVQNGHLDPNSDCLCLGRPLQNRDQMRANVINEIMSTERHYIKHLKDICEGYLKQCRKRRDMFSDEQLKVIFGNIEDIYRFQMGFVRDLEKQYNNDDPHLSEIGPCFLEHQDGFWIYSEYCNNHLDACMELSKLMKDSATSTSLRPXASCSR

SEQ ID NO: 900 - protein, 496 aa, Homo sapiens; identical to SEQ ID NO: 746

SEQ ID NO: 901 - protein, 117 aa, Homo sapiens
  SITE (76): Xaa equals any of the naturally occurring L-amino acids
  SITE (104): Xaa equals any of the naturally occurring L-amino acids
GRAHSLLVTSMGHIKLTDFGLSKVGLMSMTTNLYEGHIEKDAREFLDKQVCGTPEYIAPEVILRQGYGKPVDWWAXGIILYEFLVGCVPFFGDTPEGYLDKSSXMRSTGLRRMRHPT

SEQ ID NO: 902 - protein, 220 aa, Homo sapiens
VVYLCDNWGGHFPCALKSVVPPDEKHWNDLALEFHYMRSLPKHERLVDLHGSVIDYNYGGGSSIAVLLIMERLHRDLYTGLKAGLTLETRLQIALDVVEGIRFLHSQGLVHRDIKLKNVLLDKQNRAKITDLGFCKPEAMMSGSIVGTPIHMAPELFTGARPERLPVFDEECWQLMEACWDGDPLKRPLLGIVQPMLQGIMNRLCKSNSEQPNRGLDDST

SEQ ID NO: 903 - protein, 140 aa, Homo sapiens
  SITE (132): Xaa equals any of the naturally occurring L-amino acids
  SITE (137): Xaa equals any of the naturally occurring L-amino acids
  SITE (140): Xaa equals any of the naturally occurring L-amino acids
PASSGQEMQSTANYLWHTDDLLGQGATASVYKARNKKSGELVAVKVFNTTSYLRPREVQVREFEVLRKLNHQNIVKLFAVEETGGSRQKVLVMEYCSSGSLLSVLESPENAFGLPEDEFLVVLRLWWPHEPXAGERXCAX

SEQ ID NO: 904 - protein, 192 aa, Homo sapiens
NPSSMAVSFTSGSCQKQPQDASPPPKECDQGTLSASLNPSNSESSPSRCPSDPDSTSQPRSGASADVARDVKQPTATPRSYRNFRHPEIVGYSVPGRNGQSQDLVKGCARTAQAPEDRSTEPDGSEAEGNQVYFAVYTFKARNPNELSVSANQKLKILEFKDVTGNTEWWLAEVNGKKGYVPSNYIRKTEYT

SEQ ID NO: 905 - protein, 402 aa, Homo sapiens
DPRVRYPAGATARRLARGCWSALWDYETPKVIVVRNRRLGVLYRAVQLLILLYFVWYVFIVQKSYQESETGPESSIITKVKGITTSEHKVWDVEEYVKPPEGGSVFSIITRVEATHSQTQGTCPESIRVHNATCLSDADCVAGELDMLGNGLRTGRCVPYYQGPSKTCEVFGWCPVEDGASVSQFLGTMAPNFTILIKNSIHYPKFHFSKGNIADRTDGYLKRCTFHEASDLYCPIFKLGFIVEKAGESFTELAHKGGVIGVIINWDCDLDLPASECNPKYSFRRLDPKHVPASSGYNFRFAKYYKINGTTTRTLIKAYGIRIDVIVHGQAGKFSLIPTIINLATALTSVGVGSFLCDWILLTFMNKNKVYSHKKFDKMVDTPASEPAQASTPTDPKGLAQL

SEQ ID NO: 906 - protein, 251 aa, Homo sapiens
  SITE (206): Xaa equals any of the naturally occurring L-amino acids
  SITE (219): Xaa equals any of the naturally occurring L-amino acids
  SITE (234): Xaa equals any of the naturally occurring L-amino acids
  SITE (250): Xaa equals any of the naturally occurring L-amino acids
TCKRTMKDYDELLKYYELHETIGTGGFAKVKLACHILTGEMVAIKIMDKNTLGSDLPRIKTEIEALKNLRHQHICQLYHVLETANKIFMVLEYCPGGELFDYIISQDRLSEEETRVVFRQIVSAVAYVHSQGYAHRDLKPENLLFDEYHKLKLIDFGLCAKPKGNKDYHLQTCCGSLAYAAPELIQGKSYLGSEADVWSMGILLYXLMCGFLPFDDDNXMALYKKIMRGKYDGXKWLSPVAFCFFNKCCXG

SEQ ID NO: 907 - protein, 491 aa, Homo sapiens
MFPDNFVKEIKRETEFKDDSLPIKRERHGNVASLVQRISTYGLPAGGIQPHPQTKNIKKKTKKRQCKVLFEYIPQNEDELELKVGDIIDINEEVEEGWWSGTLNNKLGLFPSNFVKELEVTDDGETHEAQDDSETVLAGPTSPIPSLGNVSETASGSVTQPKKIRGIGFGDIFKEGSVKLRTRTSSSETEEKKPEKPLILQSLGPKTQSVEITKTDTEGKIKAKEYCRTLFAYEGTNEDELTFKEGEIIHLISKETGEAGWWRGELNGKEGVFPDNFAVQINELDKDFPKPKKPPPPAKAPAPKPELIAAEKKYFSLKPEEKDEKSTLEQKPSKPAAPQVPPKKPTPPTKASNLLRSSGTVYPKRPEKPVPPPPPIAKINGEVSSISSKFETEPVSKLKLDSEQLPLRPKSVDFDSLTVRTSKETDVVNFDDIASSENLLHLTANRPKMPGRRLPGRFNGGHSPTHSPEKILKLPKEEDSANLKPSEKKKK

SEQ ID NO: 908 - protein, 332 aa, Homo sapiens
ISDLLVGIFCMPITLLDNIIAGWPFGNTMCKISGLVQGISVAASVFTLVAIAVDRFQCVVYPFKPKLTIKTAFVIIMIIWVLAITIMSPSAVMLHVQEEKYYRVRLNSQNKTSPVYWCREDWPNQEMRKIYTTVLFANIYLAPLSLIVIMYGRIGISLFRAAVPHTGRKNQEQWHVVSRKKQKIIKMLLIVALLFILSWLPLWTLMMLSDYADLSPNELQIINIYIYPFAHWLAFGNSSVNPIIYGFFNENFRRGFQEAFQLQLCQKRAKPMEAYALKAKSHVLINTSNQLVQESTFQNPHGETLLYRKSAEKPQQELVMEELKETTNSSEI

SEQ ID NO: 909 - protein, 299 aa, Homo sapiens
LLRMLSKFLDRPQFINIFHLTGIQNLCNYILGKERKRHLTYAEFTQFLLEIQLEHAKQAFVQRDNARTGRVTAIDFRDIMVTIRPHVLTPFVEECLVAAAGGTTSHQVSFSYFNGFNSLLNNMELIRKIYSTLAGTRKDVEVTKEEFVLAAQKFGQVTPMEVDILFQLADLYEPRGRMTLADIERIAPLEEGTLPFNLAEAQRQKASGDSARPVLLQVAESAYRFGLGSVAGAVGATAVYPIDLVKTRMQNQRSTGSFVGELMYKNSFDCFKKVYAMKASLDCIEVCCHSYWELPQRRP

SEQ ID NO: 910 - protein, 555 aa, Homo sapiens
  SITE (207): Xaa equals any of the naturally occurring L-amino acids
  SITE (312): Xaa equals any of the naturally occurring L-amino acids
  SITE (314): Xaa equals any of the naturally occurring L-amino acids
PLHRQTPSPLCERTKPQKSLHLLRLAISRGPLAPSSLMSCVKLWPSGAPAPLVSIEELENQELVGKGGFGTVFRAQHRKWGYDVAVKIVNSKAISREVKAMASLDNEFVLRLEGVIEKVNWDQDPKPALVTKFMENGSLSGLLQSQCPRPWPLLCRLLKEVVLGMFYLHDQNPVLLHRDLKPSNVLLDPELHVKLADFGLSTFQGGXQSGTGSGEPGGTLGYLAPELFVNVNRKASTASDVYSFGILMWAVLAGREVELPTEPSLVYEAVCNRQNRPSLAELPQAGPETPGLEGLKELMQLCWSSEPKDRPXFXECLPKTDEVFQMVENNMNAAVSTVKDFLSQLRSSNRRFSIPESGQGGTEMDGFRRTIENQHSRNDVMVSEWLNKLNLEEPPSSVPKKCPSLTKRSRAQEEQVPQAWTAGTSSDSMAQPPQTPETSTFRNQMPSPTSTGTPSPGPRGNQGAERQGMNWSCRTPEPNPVTGRPLVNIYNCSGVQVGDNNYLTMQQTTALPTWGLAPSGKGRGLQHPPPVGSQEGPKDPEAWSRPQGWYNHSGK

SEQ ID NO: 911 - protein, 223 aa, Homo sapiens
  SITE (7): Xaa equals any of the naturally occurring L-amino acids
  SITE (26): Xaa equals any of the naturally occurring L-amino acids
SSLFIWXNSRSSTAVAAALELVDPPXCRNSARASHCGPWIETISPRPPPLPGARRCLQESWGQLASMYVSTRERYKWLRFSEDCLYLNVYAPARAPGDPQLPVMVWFPGGAFIVGAASSYEGSDLAAREKVVLVFLQHRLGIFGFLSTDDSHARGNWGLLDQMAALRWVQENIAAFGGDPGNVTLFGQSAGAMSISGLMMSPLASGLFHRAISRVAPRIQLLY

SEQ ID NO: 912 - protein, 83 aa, Homo sapiens
PRVRMTNRSTLVPDFGSVAVMAQEIDSTVKRNVKKPAFKDEQVNWPVSIKSIELPNFHIFTQYKYSTIFECKKKKKKKKKKKK

SEQ ID NO: 913 - protein, 278 aa, Homo sapiens
RSADGLCGNKDRERGNEFTRNQQAAQEVVNPKKKMKKKKYVNSGTVTLLSFAVESECTFLDYIKGGTQINFTVAIDFTASNGNPSQSTSLHYMSPYQLNAYALALTAVGEIIQHYDSDKMFPALGFGAKLPPDGRVSHEFPLNGNQENPSCCGIDGILEAYHRSLRTVQLYGPPTLPPWSPTWPGMQRPCRMAPSTRCCSSLLMGSSRTWRRPRRPLSTLPSSPCPSLSSAWARQSSTPWWSWMATTCGSPPGGSWLNATSSSLYPSGTTWTAQATTC

SEQ ID NO: 914 - protein, 169 aa, Homo sapiens
FGTVGTDYWLYSRGVCRTKSTSDNETSRKNEEVMTHSGLWRTCCLEGAFRGVCKKIDHFPEDADYEQDTAEYLLRAVRASSVFPILSVTLLFFGGLCVAASEFHRSRHNVILSAGIFFVSAGLSNIIGIIVYISANAGDPGAAWTSKKSYSYGWSFYFREPSLSSSQKL

SEQ ID NO: 915 - protein, 190 aa, Homo sapiens
LDRLSCLDGTPPLSWHMRCKIAQGAANGINFLHENHHIHRDIKSANILLDEAFTAKISDFGLARASEKFAQTVMTSRIVGTTAYMAPEALRGEITPKSDIYSFGVVLLEIITGLPAVDEHREPQLLLDIKEEIEDEEKTIEDYIDKKMNDADSTSVEAMYSVASQCLHEKKNKRPDIKKVQQLLQEMTAS

SEQ ID NO: 916 - protein, 265 aa, Homo sapiens
GTSASRTKVFPGERVEHVTFNFTLENQIHRGGQYFNDKFIGLRLKSVSFEDSLFEECYFEDVTSSNTFFRNCTFINTVFYNTDLFEYKFVNSRLINSTFLHNKEGCPLDVTGTGEGAYMVYFVSFLGTLAVLPGNIVSALLMDKIGRLRMLAGSSVMSCVSCFFLSFGNSESAMIALLCLFGGVSIASWNALDVLTVELYPSDKRTTAFGFLNALCKLAAVLGISIFTSFVGITKAAPILFASAALALGSSLALKLPETRGQVLQ

SEQ ID NO: 917 - protein, 122 aa, Homo sapiens
KNFFCSTFFLPCKFNAKCRPGLCSSSLLNVAGSFHHIFYRPVVIEVKLMHHIFAILHNSNLDLPWANVKLFQDVDEEVLNLHPGVDAVGAIQDNDDVHVGLAPWKVGTQLWLPKEQCLLVPN

SEQ ID NO: 918 - protein, 262 aa, Homo sapiens
AGDCLHPAGGAEGPRLHPPHGICIQECQSQPILISVDGKVYLSGLRSNLSMISHGQRQRVVHDFPKYSVKVLPWLSPEVLQQNLQGYDAKSDIYSVGITACELANGHVPFKDMPATQMLLEKLNGTVPCLLDTSTIPAEELTMSPSRSVANSGLSDSLTTSTPRPSNGDSPSHPYHRTFSPHFHHFVEQCLQRNPDARPSASTLLNHSFFKQIKRRASEALPELLRPVTPITNFEGSQSQDHSGIFGLVTNLEELEVDDWEF

SEQ ID NO: 919 - protein, 548 aa, Homo sapiens
DPRVRNNQASTGHPGFPPIQGLEATKPTQQSLVGVLETAMKLANQDEGPEDEEDEVPKKQNSPVAPTAQPKAPPSRTPQSGSAPTAKAPPKATSTRAQQQLAFLEGRKKQLLQAALRAKQKNDVEGAKMHLRQAKGLEPMLEASRNGLPVDITKVPPAPVNKDDFALVQRPGPGLSQEAARRYGELTKLIRQQHEMCLNHSNQFTQLGNITETTKFEKLAEDCKRSMDILKQAFVRGLPTPTARFEQRTFSVIKIFPDLSSNDMLLFIVKGINLPTPPGLSPGDLDVFVRFDFPYPNVEEAQKDKTSVIKNTDSPEFKEQFKLCINRSHRGFRRAIQTKGIKFEVVHKGGLFKTDRVLGTAQLKLDALEIACEVREILEVLDGRRPTGGRLEVMVRIREPLTAQQLEMTTERWLVIDPVPAAVPTQVAGPKGKAPPVPAPARESGNRSARPLHSLSVLAFDQSVWSGRSWPSGRRGGRCPQKWPSSTRTSCNAASGRGHSWSRGVWASDGNTQPSWSGSCSSTRRLPGAWATMAAGMLQRRRSIGGIW

SEQ ID NO: 920 - protein, 343 aa, Homo sapiens
ARGVESGAKLDNRGPMMWRPSVLLLLLLLRHGAQGKPSPDAGPHGQGRVHQAAPLSDAPHDDAHGNFQYDHEAFLGREVAKEFDQLTPEESQARLGRIVDRMDRAGDGDGWVSLAELRAWIAHTQQRHIRDSVSAAWDTYDTDRDGRVGWEELRNATYGHYAPGEEFHDVEDAETYKKMLARDERRFRVADQDGDSMATREELTAFLHPEEFPHMRDIVIAETLEDLDRNKDGYVQVEEYIADLYSAEPGEEEPAWVQTERQQFWDFRDLNKDGHLDGSEVGHWVLPPAQDQPLVEANHLLHESDTDKDGRLSKAEILGNWNMFVGSQATNYGEDLTRHHDEL

SEQ ID NO: 921 - protein, 322 aa, Homo sapiens
YFKLRKSTRYHKDMSYAELKRNVCSFLCDGSIHLTSQYLPGYFWGSSPAKEGLHPGRAPCTCEDALHGVLEVESVHGSVSLPRRVQRSLIADVGDVSPTESWCQLCQTLGVKGAGLGQLQALQVLLKNLPPLLQRGEINEDVPVQSAWPHQSTVQNVSSVRGRQDDDMVCGTHSIHFYQKLVERLLLLRVGEAGHGGGALLAHRVDLIDVDDAGGPGSGFLKEAPHTGSAEASNDLHELWAGHRQEGHLSLRGHRLGQQRLPTAGGAEQQCALWDLGAKLEEAFWALDGSRQCNTNYLGIPFFCFLEVRSLWVTQAGVQWVP

SEQ ID NO: 922 - protein, 768 aa, Homo sapiens
  SITE (610): Xaa equals any of the naturally occurring L-amino acids
QDRRLLRLELQKTCQPTSTMSGSHTPACGPFSALTPSIWPQEILAKYTQKEESAEQPEFYYDEFGFRVYKEEGDEPGSSLLANSPLMEDAPQRLRWQAHLEFTHNHDVGDLTWDKIAVSLPRSEKLRSLVLAGIPHGMRPQLWMRLSGALQKKRNSELSYREIVKNSSNDETIAAKQIEKDLLRTMPSNACFASMGSIGVPRLRRVLRALAWLYPEIGYCQGTGMVAACLLLFLEEEDAFWMMSAIIEDLLPASYFSTTLLGVQTDQRVLRHLIVQYLPRLDKLLQEHDIELSLITLHWFLTAFASVVDIKLLLRIWDLFFYEGSRVLFQLTLGMLHLKEEELIQSENSASIFNTLSDIPSQMEDAELLLGVAMRLAGSLTDVAVETQRRKHLAYLIADQGQLLGAGTLTNLSQVVRRRTQRRKSTITALLFGEDDLEALKAKNIKQTELVADLREAILRVARHFQCTDPKNCSVELTPDYSMESHQRDHENYVACSRSHRRRAKALLDFERHDDDELGFRKNDIITIVSQKDEHCWVGELNGLRGWFPAKFVEVLDERSKEYSIAGDDSVTEGVTDLVRGTLCPALKALFEHGLKKPSLLGGACHPWLXIEEAAGREVERDFASVYSRLVLCKTFRLDEDGKVLTPEELLYRAVQSVNVTHDAVHAQMDVKLRSLICVGLNEQVLHLWLEVLCSSLPTVEKWYQPWSFLRSPGWVQIKCELRVLCCFAFSLSQDWELPAKREAQQPLKEGVRDMLVKHHLFSWDVDG

SEQ ID NO: 923 - protein, 285 aa, Homo sapiens
  SITE (96): Xaa equals any of the naturally occurring L-amino acids
AGFPLPQPACRLCLLCPRPSWLLLTGPVFPTGWFPAKFVEVLDERSKEYSIAGDDSVTEGVTDLVRGTLCPALKALFEHGLKKPSLLGGACHPWLXIEEAAGREVERDFASVYSRLVLCKTFRLDEDGKVLTPEELLYRAVQSVNVTHDAVHAQMDVKLRSLICVGLNEQVLHLWLEVLCSSLPTVEKWYQPWSFLRSPGWVQIKCELRVLCCFAFSLSQDWELPAKREVGGVGLVGPALMELPKPFAGWLRWEPKCWCQRLGTTPAMPKACEVRGCPVCRRSSP

SEQ ID NO: 924 - protein, 377 aa, Homo sapiens
SEFKMLKRKPSNVSEKEKHQKPKRSSSFGNFDRFRNNSLSKPDDSTEAHEGDPTNGSGEQSKTSNNGGGLGKKMRAISWTMKKKVGKKYIKALSEEKDEEDGENAHPYRNSDPVIGTHTEKVSLKASDSMDSLYSGQSSSSGITSCSDGTSNRDSFRLDDDGPYSGPFCGRARVHTDFTPSPYDTDSLKIKKGDIIDIICKTPMGMWTGMLNNKVGNFKFIYVDVISEEEAAPKKIKANRRSNSKKSKTLQEFLERIHLQEYTSTLLLNGYETLEDLKDIKESHLIELNIENPDDRRRLLSAAENFLEEEIIQEQENEPEPLSLSSDISLNKSQLDDCPRDSGCYISSGNSDNGKEDLESENLSDMVHKIIITEPSD

SEQ ID NO: 925 - protein, 375 aa, Homo sapiens
  SITE (1): Xaa equals any of the naturally occurring L-amino acids
XRGALGLPAGPSAARPEHGRLPASLRGGLWHRWPIRHGIIEDWDLMERFMEQVVFKYLRAEPEDHYFLMTEPPLNTPENREYLAEIMFESFNVPGLYIAVQAVLALAASWTSRQVGERTLTGIVIDSGDGVTHVIPVAEGYVIGSCIKHIPIAGRDITYFIQQLLREREVGIPPEQSLETAKAIKEKYCYICPDIVKEFAKYDVDPRKWIKQYTGINAINQKKFVIDVGYERFLGPEIFFHPEFANPDFMESISDVVDEVIQNCPIDVRRPLYKNVVLSGGSTMFRDFGRRLQRDLKRVVDARLRLSEELSGGRIKPKPVEVQVVTHHMQRYAVWFGGSMLASTPEFFQVCHTKKDYEEYGPSICRHNPVFGVMS

SEQ ID NO: 926 - protein, 134 aa, Homo sapiens
APRLQCPPLAGRGPHTLCRPVLRALWPPLSCSVSSYEKTQSYPTDWSDDESNNPFSSTDANGDSNPFDDDATSGTEVRVRALYDYEGQEHDELSFKAGDELTKMEDEDEQGWCKGRLDNGQVGLYPANYVEAIQ

SEQ ID NO: 927 - protein, 244 aa, Homo sapiens
KAEEVYAQLQKMLLEQQEKCLLFSKQFMHQGNVAETTRFEKLAQDRKKQLEILQLAQAQGLDPPTHHFELKTFQTVRIFSELNSTEMHLIIVRGMNLPAPPGVTPDDLDAFVRFEFHYPNSDQAQKSKTAVVKNTNSPEFDQLFKLNINRNHRGFKRVIQSKGIKFEIFHKGSFFRSDKLVGTAHLKLERLENECEIREIVEVLDGRKPTGGKLEVKVRLREPLSGQDVQMVTENWLVLEPRGL

SEQ ID NO: 928 - protein, 330 aa, Homo sapiens
ISDSEIAFRALVRLACRMAGQPGHMPHGGSSNNLCHTLGPVHPPDPQRHPNTLSFRCSLADFQIEKKIGRGQFSEVYKATCLLDRKTVALKKVQIFEMMDAKARQDCVKEIGLLKQLNHPNIIKYLDSFIEDNELNIVLELADAGDLSQMIKYFKKQKRLIPERTVWKYFVQLCSAVEHMHSRRVMHRDIKPANVFITATGVVKLGDLGLGRFFSSETTAAHSLVGTPYYMSPERIHENGYNFKSDIWSLGCLLYEMAALQSPFYGDKMNLFSLCQKIEQCDYPPLPGEHYSEKLRELVSMCICPDPHQRPDIGYVHQVAKQMHIWMSST

SEQ ID NO: 929 - protein, 136 aa, Homo sapiens
  SITE (48): Xaa equals any of the naturally occurring L-amino acids
  SITE (65): Xaa equals any of the naturally occurring L-amino acids
  SITE (110): Xaa equals any of the naturally occurring L-amino acids
PASQRKFEIHVLDDPPSILYTILSFPRAMPQILLLLFLSFLIPWQERXSRNRVAFSVLEPLSQCXMKFFLPLLIASSLLLQSFSPFSLTVLTWDLMLLCYRTAFLFTVSXSLNLRMCFFSALGLPVASLVGYISRD

SEQ ID NO: 930 - protein, 439 aa, Homo sapiens
  SITE (195): Xaa equals any of the naturally occurring L-amino acids
  SITE (226): Xaa equals any of the naturally occurring L-amino acids
AAEPPRARPDGLAEPAVRGRRVGSGPRGTMSAKVRLKKLEQLLLDGPWRNESALSVETLLDVLVCLYTECSHSALRRDKYVAEFLEWAKPFTQLVKEMQLHREDFEIIKVIGRGAFGEVAVVKMKNTERIYAMKILNKWEMLKRAETACFREERDVLVNGDCQWITALHYAFQDENHLYLVMDYYVGGDLLTLLXKFEDKLPEDMARFYIGEMVLAIDSIHQLHYXHRDIKPDNVLLDVNGHIPLADFGSCLKMNDDGTVQSSVPVGTPDYISPEILQPMEDGMAKYGPECDWWSLGVCMYEMLYGETPFYAESLVETYGKIMNHEERFQFPSHVTDVSEEAKDLIQRLICSRERRLGQNGIEDFKKHAFFEGLNWENIRNLEAPYIPDVSSPSDTSNFDVDDDVLRNTEILPPGSHTGFSGLHLAIHWFYIHNGKLFF

SEQ ID NO: 931 - protein, 377 aa, Homo sapiens
  SITE (141): Xaa equals any of the naturally occurring L-amino acids
DWNPQNMPGNATPVTTTAPWASLGLSAKTCNNVSFEESRIVLVVVYSAVCTLGVPANCLTAWLALLQVLQGNVLAVYLLCLALCELLYTGTLPLWVIYIRNQHRWTLGLLACKVTAYIFFCNIYVSILFLCCISCDRFVAXVYALESRGRRRRRTAILISACIFILVGIVHYPVFQTEDKETCFDMLQMDSRIAGYYYARFTVGFAIPLSIIAFTNHRIFRSIKQSMGLSAAQKAKVKHSAIAVVVIFLVCFAPYHLVLLVKAAAFSYYRGDRNAMCGLEERLYTASVVFLCLSTVNGVADPIIYVLATDHSRQEVSRIHKGWKEWSMKTDVTRLTHSRDTEELQSPVALADHYTFSRPVHPPGSPCPAKRLIEESC

SEQ ID NO: 932 - protein, 177 aa, Homo sapiens
REQKLELHRGGGRSRTSGSPGLQEFGTSWMAPEVIKSSLFSKGSDIWSYGVLLWELLTGEVPYRGIDGLAVAYGVAVNKLTLPIPSTCPEPFAKLMKECWQQDPHIRPSFALILEQLTAIEGAVMTEMPQESFHSMQDDWKLEIQQMFDELRTKEKDHKTNRGDWRLCRGLGCHLSE

SEQ ID NO: 933 - protein, 69 aa, Homo sapiens
CLRAIFIVMLHARIENGIGPFYVAIFDFLNHLTTCTHLQCVIHGAVPSLHNRTRSQAPTHRDSPCPRYL

SEQ ID NO: 934 - protein, 49 aa, Homo sapiens
PSKSNGHFMLKRISIQTSHILGAQEPLVAIVATWWTAKLQASREEGLNR

SEQ ID NO: 935 - protein, 51 aa, Homo sapiens; identical to SEQ ID NO: 611
  SITE (14): Xaa equals any of the naturally occurring L-amino acids
  SITE (30): Xaa equals any of the naturally occurring L-amino acids
  SITE (47): Xaa equals any of the naturally occurring L-amino acids

SEQ ID NO: 936 - protein, 191 aa, Homo sapiens
  SITE (124): Xaa equals any of the naturally occurring L-amino acids
  SITE (157): Xaa equals any of the naturally occurring L-amino acids
  SITE (177): Xaa equals any of the naturally occurring L-amino acids
FGTSPKGTVQAWGVFLALPPRPSSSPEMRGKRRRKWWLRTGGGKPRAYCRLSLNDSEVDMFGDYDSFTENSFIAQVDDLEQKYMQLPEHKKHATDFATENLCSESIKNKLSITTIGNLTELQTXKHTENQSGYEGVTIEPGADLLYDVPSSQAIYFXNLQNSSNDLGDHSMKDRDWXSSSHNTVNEELPHN

SEQ ID NO: 937 - protein, 116 aa, Homo sapiens
GTQNLQLVCFTELRNREVFGWTGELGPGIYWLIPSTTGCRLRKKIKPVTDEAQLVYRDETGELFLTKEFKSTLSDIFEVIDLDGNGLLSLEEYNFFELRTVVRNVMKMLGASAERI

SEQ ID NO: 938 - protein, 138 aa, Homo sapiens
  SITE (31): Xaa equals any of the naturally occurring L-amino acids
  SITE (76): Xaa equals any of the naturally occurring L-amino acids
  SITE (127): Xaa equals any of the naturally occurring L-amino acids
  SITE (135): Xaa equals any of the naturally occurring L-amino acids
TCNEGLLLVGASVLQCLATGNWNSVPPECQXIPCTPLLSPQNGTMTCVQPLGSSSYKSTCQFICDEGYSLSGPERXDCTRSGRWTDSPPMCEAIKCPELFAPEQGSLDCSGQSWRISMFGFQLAISXVNKGFKLXGAQ

SEQ ID NO: 939 - protein, 163 aa, Homo sapiens
  SITE (155): Xaa equals any of the naturally occurring L-amino acids
  SITE (157): Xaa equals any of the naturally occurring L-amino acids
  SITE (162): Xaa equals any of the naturally occurring L-amino acids
RPTRPDRHCGHHSLFYHSGYRAGRTTGQWTAGHVSGHPEGHPPGKVFRIFKLSRHSKGLQILGQTLKASMRELGLLIFFLFIGVILFSSAVYFAEVDEPESHFSSIPDGFWWAVVTMTTVRLWGHVPDHPRGVRIVGTLCAIGRGPHHCPPCGLXLXSNFQXI

SEQ ID NO: 940 - protein, 102 aa, Homo sapiens
  SITE (93): Xaa equals any of the naturally occurring L-amino acids
  SITE (101): Xaa equals any of the naturally occurring L-amino acids
GTLVSESAQLEILSLKEVGDIKASTEMRLRRFQSVESGANNVVFIRTLGIEPEKLVHHILQDMYKTKKKKTRVILRMLPISGTCKLFRRYEKXCRNIFGTXV

SEQ ID NO: 941 - protein, 42 aa, Homo sapiens
RNFSAGDTAISKYFGLIPENLMQKIRFSSKLVMMLCKGFLKA

SEQ ID NO: 942 - protein, 60 aa, Homo sapiens
  SITE (42): Xaa equals any of the naturally occurring L-amino acids
  SITE (49): Xaa equals any of the naturally occurring L-amino acids
TENFAEMKFPCWYTFVNHSIENQHKAIAFLNVFIKTRIISAXHLPMHMXNPGYAFPDGKY

SEQ ID NO: 943 - protein, 55 aa, Homo sapiens
ATLFTFFISAKEYCRTLFAYEGTNEDELTFKEGEIIHLISKVRCFCFSVNCLIYL

SEQ ID NO: 944 - protein, 209 aa, Homo sapiens
  SITE (90): Xaa equals any of the naturally occurring L-amino acids
  SITE (106): Xaa equals any of the naturally occurring L-amino acids
  SITE (158): Xaa equals any of the naturally occurring L-amino acids
  SITE (160): Xaa equals any of the naturally occurring L-amino acids
  SITE (178): Xaa equals any of the naturally occurring L-amino acids
  SITE (182): Xaa equals any of the naturally occurring L-amino acids
AISPGFPFCPLLLTPVAWGLVGAIAYAGVLGTIELKLDLVLLGAVAAVSSFLPFLWKAWAGWGSKRPLATLFPIPGPVLLLLLFRLAVFXSDSFVVAEARATPFLXGSFILLLVVQLHWEGQLLPPKLLTMPRLGTSATTNPPRHNGAYALRLGIGVXLXTRLAGLFHRCPEETPVCXSSPXLSPLASMVGGRAKNLWYGTCVAALVAL

SEQ ID NO: 945 - protein, 89 aa, Homo sapiens
FRIWGKAILNVKLGTGGTIPVSYVKIPGKLDLSFPQEGRLKYNQGICRSCSLINSPKDWCKKKAFPSTTEEENSGGQKSAAATKGMLPV

SEQ ID NO: 946 - protein, 76 aa, Homo sapiens
  SITE (62): Xaa equals any of the naturally occurring L-amino acids
EVIEGRQLSGNNIRPVVKVHVCGQTHRTRIKRGNNPFFDELFFYNVNMTPSELMDEIISIRXYNSHSLRADCLMGI

SEQ ID NO: 947 - protein, 57 aa, Homo sapiens; identical to SEQ ID NO: 624

SEQ ID NO: 948 - protein, 99 aa, Homo sapiens
  SITE (17): Xaa equals any of the naturally occurring L-amino acids
ARATMATDELATKLSRXLQMEGEPQSPSRRVFNPYTEFKEFSRKQIKDMEKMFKQYDAGRDGFIDLMELKLMMEKLGAPQTHLGLKNMIKEVDEDLTAS

SEQ ID NO: 949 - protein, 122 aa, Homo sapiens
  SITE (104): Xaa equals any of the naturally occurring L-amino acids
VLPRRCLVFVVNTMDSSREPTLGRLDAAGFWQVWQRFDADEKGYIEEKELDAFFLHMLMKLGTDDTVMKANLHKVKQQFMTTQDASKDGRIRMKELAGMFLSEXENFLLLFRRENHWTSSVE

SEQ ID NO: 950 - protein, 91 aa, Homo sapiens
  SITE (6): Xaa equals any of the naturally occurring L-amino acids
ITKHNXCFVLLSSMRYFDRAALFVEACLKYGAFEVTEDTEKLITAIYADYARSLKNLGFKQGAVLFASKAGAAGKDLLNELEFPKEEPMEE

SEQ ID NO: 951 - protein, 56 aa, Homo sapiens
KGYSSWDRLGFLSFMFLSFPHDNQIIIRNKMLRIQRWLYVNTVLIGQRRKSMRSIH

SEQ ID NO: 952 - protein, 163 aa, Homo sapiens
  SITE (154): Xaa equals any of the naturally occurring L-amino acids
  SITE (162): Xaa equals any of the naturally occurring L-amino acids
FAIKLQNLQTVRLVFKIQTQTPRKKTIGECSMSLRTLSTQEMDYSLDITPPSKISVCHAELELGTCFQAVNSRIQLQILEARYLPSSSTPLTLSFFVKVGMFSSGELIYKKKTRLLKASNGRVKWGETMIFPLIQSEKEIVFLIKLYSRSSVRXKTLCGARXG

SEQ ID NO: 953 - protein, 265 aa, Homo sapiens
  SITE (5): Xaa equals any of the naturally occurring L-amino acids
  SITE (11): Xaa equals any of the naturally occurring L-amino acids
  SITE (191): Xaa equals any of the naturally occurring L-amino acids
  SITE (246): Xaa equals any of the naturally occurring L-amino acids
  SITE (251): Xaa equals any of the naturally occurring L-amino acids
  SITE (259): Xaa equals any of the naturally occurring L-amino acids
  SITE (262): Xaa equals any of the naturally occurring L-amino acids
  SITE (264): Xaa equals any of the naturally occurring L-amino acids
YKGCXLREHTXWLVMEYCLGSASDLLEVHKKPLQEVEIAAITHGALQGLAYLHSHTMIHRDIKAGNILLTEPGQVKLADFGSASMASPANSFVGTPYWMAPEVILAMDEGQYDGKVDVWSLGITCIELAERKPPLFNMNAMSALYHIAQNESPTLQSNEWSDYFRNFVDSCLQKIPQDRPTSEELLKHIFXLRERPETVLIDLIQRTKDAVRELDNLQYRKMKKLLFRRHINGPAVEAQEGRRGTXIMGVXRTGTGNSXWKXIXS

SEQ ID NO: 954 - protein, 114 aa, Homo sapiens
  SITE (76): Xaa equals any of the naturally occurring L-amino acids
GPRCLASPEPGPRDGQAHSLYIRIVEGKNLPAKDITGSSDPYCIVKVDNEPIIRTATVWKTLCPFWGEEYQVHLPXTFHAVAFYVMDEDALSRDDVIGKVCLTRDTIASHPKGF

SEQ ID NO: 955 - protein, 122 aa, Homo sapiens
AVCNEIINIAEKSVHYCSTVSHPLDFHHKVSPSDNKSSLIISQQPQAQQRRVTPDRSQTSQDLFSYQALYSYIPQNDDELELRDGDIVDVMEKCDDGWFVGTSRRTKQFGTFPGNYVKPLYL

SEQ ID NO: 956 - protein, 349 aa, Homo sapiens
  SITE (28): Xaa equals any of the naturally occurring L-amino acids
  SITE (65): Xaa equals any of the naturally occurring L-amino acids
  SITE (66): Xaa equals any of the naturally occurring L-amino acids
  SITE (178): Xaa equals any of the naturally occurring L-amino acids
  SITE (190): Xaa equals any of the naturally occurring L-amino acids
  SITE (270): Xaa equals any of the naturally occurring L-amino acids
TWDKQTGKGSTALHYCCLTDNAECLKLXLRGKASIEIANESGETPLDIAKRLKHEHCEELLTQAXXGRFNSHVHVEYEWRLLHEDLDESDDDMDEKLQPSPNRREDRPISFYQLGSNQLQSNAVSLARDAANLAKEKQRAFMPSILQNETYGALLSGSPPPAQPAAPSTTSAPPLPPXNVGKDPLTPTPXPPVAKTPSVMEALSQPSKPAPPGISQIRPPPLPPQPPSRLPQKKPAPGADKSTPLTNKGQPRGPVDLSATEALGPLSNAXVLQPPAPMPRKSQATKLKPKRVKALYNCVADNPDELTFSEGDVIIVDGEEDQEWWIGHIDGDPGRKGAFPVSFVHFIAD

SEQ ID NO: 957 - protein, 143 aa, Homo sapiens
  SITE (12): Xaa equals any of the naturally occurring L-amino acids
  SITE (25): Xaa equals any of the naturally occurring L-amino acids
  SITE (59): Xaa equals any of the naturally occurring L-amino acids
  SITE (137): Xaa equals any of the naturally occurring L-amino acids
GTRRAWLGPAEXGKERRSEGASGAXSPKPSRAANPPARPRSCPPCLAAGPSMVMADGPXHLQRGPVRVGFYDIEGTLGKGNFAVVKLGRHRITKTEVAIKIIDKSQLDAVNLEKIYREVQIMKMLDHPHIIKLYQVXETKSML

SEQ ID NO: 958 - protein, 113 aa, Homo sapiens; identical to SEQ ID NO: 637

SEQ ID NO: 959 - protein, 182 aa, Homo sapiens
  SITE (151): Xaa equals any of the naturally occurring L-amino acids
  SITE (161): Xaa equals any of the naturally occurring L-amino acids
  SITE (173): Xaa equals any of the naturally occurring L-amino acids
CEAIDMWSLGCVIAELFLGWPLYPGASEYDQIRYISQTQGLPAEYLLSAGTKTTRFFNRDPNLGYPLWRLKTPEEHELETGIKSKEARKYIFNCLDDMAQVNMSTDLEGTDMLAEKADRREYIDLLKKMLTIDADKRITPLKTLNHQFVTXTHLLDFPHSXHVKSWFQNMEIXKRRVHMYDQ

SEQ ID NO: 960 - protein, 125 aa, Homo sapiens
  SITE (122): Xaa equals any of the naturally occurring L-amino acids
LEPEKLVHHILQDMYKTKKKKTRVILRMLPISGTCKAFLEDMKKYAETFLEPWFKAPNKGTFQIVYKSRNNSHVNREEVIRELAGIVCTLNSENKVDLTNPQYTVVVEIIQSCLLPECCERXHVV

SEQ ID NO: 961 - protein, 272 aa, Homo sapiens
  SITE (33): Xaa equals any of the naturally occurring L-amino acids
  SITE (207): Xaa equals any of the naturally occurring L-amino acids
  SITE (262): Xaa equals any of the naturally occurring L-amino acids
  SITE (267): Xaa equals any of the naturally occurring L-amino acids
  SITE (270): Xaa equals any of the naturally occurring L-amino acids
GCGRGGEARAVRTDSHRLSPVPCDLKTIVAAGXWQSQAVHLLGVLVSYCDFIMENQLAKSTEERTFQYQDSLPSLPVPSLEESLKKYLESVKPFANQEEYKKTEEIVQKFQSGIGEKLHQKLLERAKGKRNWLEEWWLNVAYLDVRIPSQLNVNFAGPAAHFEHYWPPKEGTQLERGSITLWHNLNYWQLLRKEKVPVHKVGNTPLXMNQFRMLFSTCKVPGITRDSIMNYFRTESEGRSPNHIVVLCRGRAFVFDVIHEGXLVTPXELXRH

SEQ ID NO: 962 - protein, 196 aa, Homo sapiens
  SITE (18): Xaa equals any of the naturally occurring L-amino acids
  SITE (29): Xaa equals any of the naturally occurring L-amino acids
  SITE (119): Xaa equals any of the naturally occurring L-amino acids
  SITE (135): Xaa equals any of the naturally occurring L-amino acids
  SITE (166): Xaa equals any of the naturally occurring L-amino acids
KHGGVPAVVGALLLHAAXAGHWEHAGEHXAILTPLTDSKIISSHLPKEAISGLVCLVNCAIGMVFTMEAGNYWFDIFNDYAATLSLLLIVLVETIAVCYVYGLRRFESDLKAMTGRAVXWYWKVMWAGVTTADCXPLCLLPERLHPHGDPEVSSLGRLPGPARDQXLPGLCTGCHRAACGLLHHVHPPGGPGDFCS

SEQ ID NO: 963 - protein, 101 aa, Homo sapiens; identical to SEQ ID NO: 644

SEQ ID NO: 964 - protein, 142 aa, Homo sapiens
FKFFMEQHVENVIKTYQQKVNRRLQLEQEMAKAGLCEAEQEQMRKILYQKESNYNRLKRAKMDKSMFVKIKTLGIGAFGEVCLACKVDTHALYAMKTLRKKDVLNRNQVAHVKAERDILAEADNEWVANSTTPSKTKTACTL

SEQ ID NO: 965 - protein, 302 aa, Homo sapiens
  SITE (1): Xaa equals any of the naturally occurring L-amino acids
  SITE (2): Xaa equals any of the naturally occurring L-amino acids
  SITE (8): Xaa equals any of the naturally occurring L-amino acids
  SITE (17): Xaa equals any of the naturally occurring L-amino acids
XXTVTDRXSRVDPRVRXILFEEYQFQAVLRVNAGALSAHRYFRDNPSELCCIIVDSGYSFTHIVPYCRSKKKKEAIIRINVGGKLLTNHLKEIISYRQLHVMDETHVINQVKEDVCYVSQDFYRDMDIAKLKGEENTVMIDYVLPDFSTIKKGFCKPREEMVLSGKYKSGEQILRLANERFAVPEILFNPSDIGIQEMGIPEAIVYSIQNLPEEMQPHFFKNIVLTGGNSLFPGFRDRVYSEVRCLTPTDYDVSVVLPENPITYAWEGGKLISENDDFEDMVVTREDYEENGHSVCEEKFDI

SEQ ID NO: 966 - protein, 189 aa, Homo sapiens
GQLHATRDGRKQVSRELGARRLVGSVTMAGLRNESEQEPLLGDTPGSREWDILETEEHYKSRWRSIRILYLTMFLSSVGFSVVMMSIWPYLQKIDPTADTSFLGWVIASYSLGQMVASPIFGLWSNYRPRKEPLIVSILISVAANCLYAYLHIPASHNKYYMLVARGLLGIGAGKVVCICLVVSYSHSF

SEQ ID NO: 967 - protein, 261 aa, Homo sapiens
KTSAGVQGRNRQICRRQIAAFFAESLPSVGGQIIPPAGYFSQVAEHIRKAGGVFVADEIQVGFGRVGKHFWAFQLQGKDFVPDIVTMGKSIGNGHPVACVAATQPVARAFEATGVEYFNTFGGSPVSCAVGLAVLNVLEKEQLQDHATSVGSFLMQLLGQQKIKHPIVGDVRGVGLFIGVDLIKDEATRTPATEEAAYLVSRLKENYVLLSTDGPGRNILKFKPPMCFSLDNARQVVAKLDAILTDMEEKVRSCETLRLQP

SEQ ID NO: 968 - protein, 587 aa, Homo sapiens
  SITE (21): Xaa equals any of the naturally occurring L-amino acids
  SITE (93): Xaa equals any of the naturally occurring L-amino acids
  SITE (214): Xaa equals any of the naturally occurring L-amino acids
  SITE (230): Xaa equals any of the naturally occurring L-amino acids
  SITE (296): Xaa equals any of the naturally occurring L-amino acids
  SITE (469): Xaa equals any of the naturally occurring L-amino acids
  SITE (470): Xaa equals any of the naturally occurring L-amino acids
  SITE (504): Xaa equals any of the naturally occurring L-amino acids
  SITE (582): Xaa equals any of the naturally occurring L-amino acids
FVLPSPRPRDPLSRSARQRGXLQPSRRGGFQVRVRGGRWRLGPRPERNSFRELSPWARIVCRNSPESGGGGLDRASTGIRQEFRRQLRRWRRXPLSSQDLPLSLPVSWWVPLPQPGVSAARRPPPQSACRVTPATFATLLSLGDCEREGVSGPRPQDGGGRSPARSPGSWLFPGLWLLVLSGPGGLLRAQEQPSCRRAFDLYFVLDKSGSVANXWIEIYNFVQQLAERFXSPEMRLSFIVFSSQATIILPLTGDRGKISKGLEDLKRVSPVGETYIHEGLKLANEQIQKAGGLKTXSIIIALTDGKLDGLVPSYAEKEAKISRSLGASVYCVGVLDFEQAQLERIADSKEQVFPVKGGFQALKGIINSILAQSCTEILELQPSSVCVGEEFQIVLSGRGFMLGSRNGSVLCTYTVNETYTTSVKPVSVQLNSMLCPAPILNKAGETLDVSVSFNGGKSVISGSLIVTAXXCSNGIAAIIVILVLLLLLGIGLMWWFWPLCCKVXIKDPPPPPPPAPKEEEEEPLPTKKWPTVDASYYGGRGVGGIKRMEVRWGDKGSTEEGARLEKAKNAVVKIPEETEEPXKAKTT

SEQ ID NO: 969 - protein, 134 aa, Homo sapiens
  SITE (29): Xaa equals any of the naturally occurring L-amino acids
  SITE (82): Xaa equals any of the naturally occurring L-amino acids
  SITE (86): Xaa equals any of the naturally occurring L-amino acids
  SITE (89): Xaa equals any of the naturally occurring L-amino acids
  SITE (92): Xaa equals any of the naturally occurring L-amino acids
  SITE (97): Xaa equals any of the naturally occurring L-amino acids
  SITE (102): Xaa equals any of the naturally occurring L-amino acids
  SITE (125): Xaa equals any of the naturally occurring L-amino acids
FSTKGMTADEWAEKMPKGPPPTSPKATAXRDILARLHKAVTSHYHAITQEFENFDTMKTNTISREEFRAICNRRVQILTDEXFDRXWNXMPXMPRGXLNTRXSDKVSSRQSTPMALGLGGPKGQXLRSKTIAYA

SEQ ID NO: 970 - protein, 301 aa, Homo sapiens
  SITE (118): Xaa equals any of the naturally occurring L-amino acids
  SITE (123): Xaa equals any of the naturally occurring L-amino acids
  SITE (129): Xaa equals any of the naturally occurring L-amino acids
  SITE (147): Xaa equals any of the naturally occurring L-amino acids
  SITE (156): Xaa equals any of the naturally occurring L-amino acids
  SITE (182): Xaa equals any of the naturally occurring L-amino acids
  SITE (185): Xaa equals any of the naturally occurring L-amino acids
  SITE (191): Xaa equals any of the naturally occurring L-amino acids
  SITE (196): Xaa equals any of the naturally occurring L-amino acids
  SITE (202): Xaa equals any of the naturally occurring L-amino acids
  SITE (204): Xaa equals any of the naturally occurring L-amino acids
  SITE (289): Xaa equals any of the naturally occurring L-amino acids
  SITE (291): Xaa equals any of the naturally occurring L-amino acids
  SITE (293): Xaa equals any of the naturally occurring L-amino acids
  SITE (294): Xaa equals any of the naturally occurring L-amino acids
  SITE (299): Xaa equals any of the naturally occurring L-amino acids
TPPPDCLDDLTGGMLITASSQSLAMMILGTALTGLFSVVAQILVPLAATLASPDKRGKVVGTIMSGLLLGILLARTVAGLLANLGGWRTVFWVASVLMALMALALWRGLPQMKSETHXNYPQXLGSVFXMFISDKILRTRALLGCLXFANFSILWXSMAFLLAAPPFNYSDGVIGLFGLAGXAGXLGARPXGGFAXKGKSHXTXTFGLLLLLLSWLAIWFGHTSVLALIIGILVLDLTVQGVHITNQTVIYRIHPDARNRLTAGYMTSYFIGGAAGSLISASAWQHGGXGXFXXWSDDXPA

SEQ ID NO: 971 - protein, 137 aa, Homo sapiens; identical to SEQ ID NO: 654

SEQ ID NO: 972 - protein, 52 aa, Homo sapiens
ASACRFWYPSEFLEPIHHRYQGTTAQIKTLMHYYRVPTIITKMGRNRNARYW

SEQ ID NO: 973 - protein, 184 aa, Homo sapiens
  SITE (1): Xaa equals any of the naturally occurring L-amino acids
  SITE (16): Xaa equals any of the naturally occurring L-amino acids
  SITE (40): Xaa equals any of the naturally occurring L-amino acids
  SITE (120): Xaa equals any of the naturally occurring L-amino acids
XGSEDLPSCQRVTSCXDPGDVEHSRRLISSPKFPVGATVXYICDQGFVLMGSSILTCHDRQAGSPKWSDRAPKCLLEQLKPCHGLSAPENGARSPEKQLHPAGATIHFSCAPGYVLKGQXSIKCVPGHPRIGVTPHPSVGLPLWMGSTTVAAWMLPRHLLPPAPWMLPTLQLPSSCHWWRWCCW

SEQ ID NO: 974 - protein, 100 aa, Homo sapiens
  SITE (52): Xaa equals any of the naturally occurring L-amino acids
  SITE (95): Xaa equals any of the naturally occurring L-amino acids
ERYPKELNAIMESMLNKNPSLRPSAIEILKIPYLDEQLQNLMCRYSEMTLEXKNLDCQKEAAHIINAMQKRIHLQTLRALSEVQKMTPRERMRLXKLQAG

SEQ ID NO: 975 - protein, 164 aa, Homo sapiens
  SITE (149): Xaa equals any of the naturally occurring L-amino acids
PVVQQQPTPVTPKKYPLRQTRSSGSETEQVVDFSDRETKNTADHDESPPRTPTGNAPSSESDIDISSPNVSHDESIAKDMSLKDSGSDLSHRPKRRRFHESYNFNMKCPTPGCNSLGHLTGKHERHFSISGCPLYHNLSADECKVRAQXRDKQIEERMLSSQAR

SEQ ID NO: 976 - protein, 62 aa, Homo sapiens
  SITE (49): Xaa equals any of the naturally occurring L-amino acids
  SITE (55): Xaa equals any of the naturally occurring L-amino acids
  SITE (62): Xaa equals any of the naturally occurring L-amino acids
RHFETNNSRLLVSLFTPLVRALYDAHHTLSWMCDDASDCCQKKKKKKKXPGGARXPIPPKGX

SEQ ID NO: 977 - protein, 86 aa, Homo sapiens
  SITE (56): Xaa equals any of the naturally occurring L-amino acids
KQDVAMKLNDSNLFRQQALINGEWLDANNGEAIDVTNPANGDKLGSVPKMGADETXPLSTPPTAPCPPGARSPPKNAPTFCATGSI

SEQ ID NO: 978 - protein, 64 aa, Homo sapiens
  SITE (45): Xaa equals any of the naturally occurring L-amino acids
  SITE (50): Xaa equals any of the naturally occurring L-amino acids
RQTHSRNQCCGCTLAIDHFRYFASCIRAQEGGISEVDSETVAYHXHEPLXVVGQIIPWNFPLLM

SEQ ID NO: 979 - protein, 358 aa, Homo sapiens
SGGPLLDRKGPRLMLGLGMFFWSLFQAMSGMVHNFTQFVLVRIGMGIGEAPMNPCGVKVINDWFNIKERGRPMGFFNAASTIGVAVSPPILAAMMLVMGWRGMFITIGVLGIFLAIGWYMLYRNREHVELTAVEQAYLNAGSVNARRDPLSFAEWRSLFRNRTMWGMMLGFSGINYTAWLYLAWLPGYLQTAYNLDLKSTGLMAAIPFLFGAAGMLVNGYVTDWLVKGGMAPIKSRKICIIAGMFCSAAFTLIVPQATTSMTAVLLIGMALFCIHFAGTSCWGLIHVAVASRMTASVGSIQNFASFICASFAPIITGFIVDTTHSFRLALIICGCVTAAGALAYIFLVRQPINDPRKD

SEQ ID NO: 980 - protein, 349 aa, Homo sapiens
GPRLMLGLGMFFWSLFQAMSGMVHNFTQFVLVRIGMGIGEAPMNPCGVKVINDWFNIKERGRPMGFFNAASTIGVAVSPPILAAMMLVMGWRGMFITIGVLGIFLAIGWYMLYRNREHVELTAVEQAYLNAGSVNARRDPLSFAEWRSLFRNRTMWGMMLGFSGINYTAWLYLAWLPGYLQTAYNLDLKSTGLMAAIPFLFGAAGMLVNGYVTDWLVKGGMAPIKSRKICIIAGMFCSAAFTLIVPQATTSMTAVLLIGMALFCIHFAGTSCWGLIHVAVASRMTASVGSIQNFASFICASFAPIITGFIVDTTHSFRLALIICGCVTAAGALAYIFLVRQPINDPRKD

SEQ ID NO: 981 - protein, 159 aa, Homo sapiens
ALTSEERTRWAKAREYLIGLDPENLALLEKIQSSLLVYSMEDSSPHVTPEDYSEIIAAILIGDPTVRWGDKSYNLISFSNGVFGCNCDHAPFDAMIMVNISYYVDEKIFQNEGRWKGSEKVRDIPLPEELIFIVDEKVLNDINQAKAQYLREVYFSLFS

SEQ ID NO: 982 - protein, 107 aa, Homo sapiens
  SITE (72): Xaa equals any of the naturally occurring L-amino acids
  SITE (99): Xaa equals any of the naturally occurring L-amino acids
  SITE (103): Xaa equals any of the naturally occurring L-amino acids
IPKFKIGGKEVFRSKIIHKNLNPVWEEKACILVDHLREPLYIKVFDYDFGLQDDFMGSAFLDLTQLELNRPXDVTLTLKDPHYPGPWILESILLSVHPXPLKXRRVP

SEQ ID NO: 983 - protein, 87 aa, Homo sapiens
  SITE (44): Xaa equals any of the naturally occurring L-amino acids
GQPRRGSALPAWRCGAAALATFPAPALPGLMYRALYAFRSAEPXALAFAAGETFLVLERRARTGGWPRGRSGETGYVPPAYLRRLQV

SEQ ID NO: 984 - protein, 76 aa, Homo sapiens
  SITE (34): Xaa equals any of the naturally occurring L-amino acids
GDGRKWVWAVGRFLSTAGHLFFPAVTPSDCYVTXWLPTACSHRLQTRTVKNSSSPVWNQSFHFRIHRQLKVGQASA

SEQ ID NO: 985 - protein, 111 aa, Homo sapiens
  SITE (99): Xaa equals any of the naturally occurring L-amino acids
CSQTCRSWSGSSSRILPESLASSEASTLEAMGRKEEDDCSSWKKQTTNIRKTFIFMEVLGSGAFSEVFLVKQRLTGKLFALKCIKKSPAFRDSSLENEXCCVEKVSSMKTL

SEQ ID NO: 986 - protein, 144 aa, Homo sapiens
  SITE (3): Xaa equals any of the naturally occurring L-amino acids
  SITE (4): Xaa equals any of the naturally occurring L-amino acids
  SITE (18): Xaa equals any of the naturally occurring L-amino acids
  SITE (125): Xaa equals any of the naturally occurring L-amino acids
GVXXDYIRHLHDSQHVAXFHRGRFFRMGTHSRNSLLSPRALEQQFQRILDDPSPACPHEEHLAALTAAPRGTWAQVRTSLKTQAAEALEAVEGAAFFVSLDAEPAGLTREDPAASLDAYAHALLXGRGHDRWFDKSFTLIVFSN

SEQ ID NO: 987 - protein, 157 aa, Homo sapiens; identical to SEQ ID NO: 670
  SITE (31): Xaa equals any of the naturally occurring L-amino acids
  SITE (33): Xaa equals any of the naturally occurring L-amino acids

SEQ ID NO: 988 - protein, 160 aa, Homo sapiens
  SITE (96): Xaa equals any of the naturally occurring L-amino acids
  SITE (104): Xaa equals any of the naturally occurring L-amino acids
  SITE (113): Xaa equals any of the naturally occurring L-amino acids
  SITE (157): Xaa equals any of the naturally occurring L-amino acids
  SITE (159): Xaa equals any of the naturally occurring L-amino acids
  SITE (160): Xaa equals any of the naturally occurring L-amino acids
KFIDTQTSQSRSSKDAVGQISVHVDITATPGTGDHKVTVKVIAINDLNWQTTAMFRPFVEVCILGPNLGDKKRKQGTKTKSNTWSPKYNETFQFIXGKENRPGXYELHLSVKXYCFAREDRIIGMTVIQLQNIAEKGSYGAWYSSEKYLYGLKLVWXIXX

SEQ ID NO: 989 - protein, 209 aa, Homo sapiens
  SITE (189): Xaa equals any of the naturally occurring L-amino acids
  SITE (193): Xaa equals any of the naturally occurring L-amino acids
  SITE (194): Xaa equals any of the naturally occurring L-amino acids
  SITE (208): Xaa equals any of the naturally occurring L-amino acids
NFSPRAVRPGAPAPESPLRLLKLAFYQLRTMLRVIVESASNIPKTKFGKPDPIVSVIFKDEKKKTKKVDNELNPVWNEILEFDLRGIPLDFSSSLGIIVKDFETIGQNKLIGTATVALKDLTGDQSRSLPYKLISLLNEKGQDTGATIDLVIGYDPPSAPHPNDLSGPSVPGMGGDGEEDESDEDRLDXHSGXXAKGQFGDVSEVHLXG

SEQ ID NO: 990 - protein, 151 aa, Homo sapiens
  SITE (83): Xaa equals any of the naturally occurring L-amino acids
  SITE (115): Xaa equals any of the naturally occurring L-amino acids
  SITE (130): Xaa equals any of the naturally occurring L-amino acids
  SITE (150): Xaa equals any of the naturally occurring L-amino acids
QSPPKRAKVGAKRPTHWRHLRTTGAGQVQRSRLTRPTQRRTAGWAPRSWFQVNTRSWRTTRREAPMRCAEERGRGGAGAGGRXGPLVRPRAQPRTAPHVAAADPRPLQYVRDPTXGKEGWVPASSLSVRXGPSGSAQCLSSSDSSPGSAXL

SEQ ID NO: 991 - protein, 127 aa, Homo sapiens
VITYMLLSGLSPFLGDDDTETLNNVLSGNWYFDEETFEAVSDEAKDFVSNLIVKDQRARMNAAQCLAHPWLNNLAEKAKRCNRRLKSQILLKKYLMKRRWKKNFIAVSAANRFKKISSSGALMALGV

SEQ ID NO: 992 - protein, 106 aa, Homo sapiens
KDLGVLGSFIHREEYSLDLIPFDGDLLSMESEGAFKECYLEGDQTSLYHAAKGLMTLQALYGTIPQIFGKGECARQVANMMIRMKERVYRKAQNSNISLFFDNPPF

SEQ ID NO: 993 - protein, 173 aa, Homo sapiens
PHILQRMVTLWYRPPDVLLGSTEYSTCLDMWGVGCIFVEMIQGVAAFPGMKDIQDQLERIFLVLGTPNEDTWPGVHSLPHFKPERFTLYSSKNLRQAWNKLSYVNHAEDLASKLLQCSPKNRLSAQAALSHEYFSDLPPRLWELTDMSSIFTVPNVRLQPEAGESMRGFWEKQ

SEQ ID NO: 994 - protein, 108 aa, Homo sapiens
  SITE (4): Xaa equals any of the naturally occurring L-amino acids
  SITE (29): Xaa equals any of the naturally occurring L-amino acids
  SITE (71): Xaa equals any of the naturally occurring L-amino acids
TREXPFVMGTLVASLLTMGISTVVIGLLXGLCHDWYFRPAAVALARFGQGLGLGGEWGGAALLATENAPPXKRALYGSFPQLGAPHMPVMRDLIKQHRSPMELITILR

SEQ ID NO: 995 - protein, 132 aa, Homo sapiens
  SITE (74): Xaa equals any of the naturally occurring L-amino acids
  SITE (77): Xaa equals any of the naturally occurring L-amino acids
RATRHACRLIFLSSSLPHSISPQLDPIPRSLGVFVKVSLMNHNKFVKCKKTSAVLGSINPVYNETFSFKADATXLDXASLSLTAVQNMEGDSKATPYPGLLGWGPRGAAECSGRVSASCPDLRRSCTSSLPG

SEQ ID NO: 996 - protein, 94 aa, Homo sapiens
  SITE (29): Xaa equals any of the naturally occurring L-amino acids
  SITE (48): Xaa equals any of the naturally occurring L-amino acids
  SITE (49): Xaa equals any of the naturally occurring L-amino acids
  SITE (60): Xaa equals any of the naturally occurring L-amino acids
HVVFRYQAGREDELTITEGEWLEVIEEGXADEWVKARNQHGEVGFVPXXYLNFPDLSLPXSSQDSDNPCGQSTSIPGTGPVQLHRTECRGAELP

SEQ ID NO: 997 - protein, 229 aa, Homo sapiens
  SITE (102): Xaa equals any of the naturally occurring L-amino acids
  SITE (125): Xaa equals any of the naturally occurring L-amino acids
  SITE (126): Xaa equals any of the naturally occurring L-amino acids
PTRPEELWELRGHHYLHQESLKPAPVLVEKPLPEWPVPQFINLFLPEFPIRPIRGQQQLKILGLVAKGSFGTVLKVLDCTQKAVFAVKVVPKVKVLQRDTVXQCKEEVSIQRQINHPFVHSLGDXXQGKRHLFIMCSYCSTDLYSLWSAVGCFPEASIRLFAAELVLVLCYLHDLGIMHRDVKMENILLDERDTEISWVMRAHTVGPSYFGEAEGGKNLLWTREIGKVA

SEQ ID NO: 998 - protein, 74 aa, Homo sapiens; identical to SEQ ID NO: 682
  SITE (8): Xaa equals any of the naturally occurring L-amino acids
  SITE (55): Xaa equals any of the naturally occurring L-amino acids
  SITE (61): Xaa equals any of the naturally occurring L-amino acids
  SITE (68): Xaa equals any of the naturally occurring L-amino acids

SEQ ID NO: 999 - protein, 195 aa, Homo sapiens
  SITE (147): Xaa equals any of the naturally occurring L-amino acids
  SITE (157): Xaa equals any of the naturally occurring L-amino acids
  SITE (164): Xaa equals any of the naturally occurring L-amino acids
  SITE (171): Xaa equals any of the naturally occurring L-amino acids
  SITE (176): Xaa equals any of the naturally occurring L-amino acids
  SITE (179): Xaa equals any of the naturally occurring L-amino acids
  SITE (180): Xaa equals any of the naturally occurring L-amino acids
RTPAPWASWRRAVKISHTSPDIPAEVQMSVKEHIMRHTRLQRQTTEPASSTRHTSFKRHLPRQMHVSSVDYGNELPPAAEQPTSIGRIKPELYKQKSVDGEDAKSEATKSCGKINFSLRYDYETETLIVRILKAFDLPAKDFCGKLXTLMFKILPPXLDRQMAXLQDPGCXARTLXPHXXMEEFPFPCGLLRELG

SEQ ID NO: 1000 - protein, 111 aa, Homo sapiens
  SITE (67): Xaa equals any of the naturally occurring L-amino acids
  SITE (91): Xaa equals any of the naturally occurring L-amino acids
  SITE (100): Xaa equals any of the naturally occurring L-amino acids
ATPRRGRSRKEQSLQKLYQNREKSEEQLTLKQEEAFRSYFEIFNGPGEVDAQSLKNILLLMGFSVTXAQVEDALMSADVNGDGRVDFKDFXAVMTDTRRXFCSVEQNALSD

SEQ ID NO: 1001 - protein, 143 aa, Homo sapiens
  SITE (43): Xaa equals any of the naturally occurring L-amino acids
NSARAETLQYILDRYPKDIQEMLVQNVFLTGGNTMYPGMKARXEKELLEMRPFRSSFQVQLASNPVLDAWYGARDWALNHLDDNEVWITRKEYEEKGGEYLKEHCASNIYVPIRLPKQASRSSDAQASSKGSAAGGGGAGEQA

SEQ ID NO: 1002 - protein, 144 aa, Homo sapiens
  SITE (116): Xaa equals any of the naturally occurring L-amino acids
  SITE (134): Xaa equals any of the naturally occurring L-amino acids
  SITE (141): Xaa equals any of the naturally occurring L-amino acids
  SITE (143): Xaa equals any of the naturally occurring L-amino acids
RKERHDQQFHSLKPISGFITGDQARNFFFQSGLPQPVLAQIWALADMNNDGRMDQVEFSIAMKLIKLKLQGYQLPSALPPVMKQQPVAISSAPALVWGGIASKPPLTAVAPVPMGXIPVVGNVSNPSIFCSHSXVPPLAKXGXP

SEQ ID NO: 1003 - protein, 106 aa, Homo sapiens
  SITE (46): Xaa equals any of the naturally occurring L-amino acids
FIDIGHYVRDISAYEELVSKLNLLVEDELKQIAENIESINQNKAPXKYIGNYAILDHLGSGAFGCVYKVRKHSGQNLLAMKEVNLHNPAFGKDKKDRDSSVREYCF

SEQ ID NO: 1004 - protein, 146 aa, Homo sapiens
GEAWQGVSEEAKELVRGLLTVDPAKRLKLEGLRGSSWLQDGSARSSPPLRTPDVLESSGPAVRSGLNATFMAFNRGKREGFFLKSVENAPLAKRRKQKLRRPPPPAGAPLHQPTRAEPPSPPKGPPAEPTAPCPPPNPHHCDPLPS

SEQ ID NO: 1005 - protein, 125 aa, Homo sapiens
GQWSTQQAANMLCLCLYVPVIGEAQTEFQYFESKGLPAELKSIFKLSVFIPSQEFSTYRQWKQKIVQAGDKDLDGQLDFEEFVHYLQDHEKKLRLVFKSLDKKNDGRIDAQEIMQSLRDFGSQDI

SEQ ID NO: 1006 - protein, 175 aa, Homo sapiens
  SITE (5): Xaa equals any of the naturally occurring L-amino acids
  SITE (21): Xaa equals any of the naturally occurring L-amino acids
  SITE (143): Xaa equals any of the naturally occurring L-amino acids
WLGCXGSVVVVAMFFSEARAXSRTWEASPSEHRKWVEVFKACDEDHKGYLSREDFKTAVVMLFGYKPSKIEVDSVMSSINPNTSGILLEGFLNIVRKKKEAQRYRNEVRHIFTAFDTYYRGFLTLEDFKKAFRQVAPKLPERXVLEVFREVDRDSDGHVSFRDFEYALNYGQKEA

SEQ ID NO: 1007 - protein, 149 aa, Homo sapiens
  SITE (111): Xaa equals any of the naturally occurring L-amino acids
  SITE (133): Xaa equals any of the naturally occurring L-amino acids
PRLQVPVRNSRVDPRFRWERILEIFFRHLFAQVLDINQADAGTLPLDSSQKVREALTCELSRAEFAESLGLKPQDMFVESMFSLADKDGNGYLSFREFLDILVVFMKGSPXDKSRLMFTMYDLDENGFLSKDXFFTMMRSFIEIFQQLP

SEQ ID NO: 1008 - protein, 244 aa, Homo sapiens
  SITE (27): Xaa equals any of the naturally occurring L-amino acids
  SITE (155): Xaa equals any of the naturally occurring L-amino acids
  SITE (169): Xaa equals any of the naturally occurring L-amino acids
  SITE (220): Xaa equals any of the naturally occurring L-amino acids
  SITE (222): Xaa equals any of the naturally occurring L-amino acids
GDFLGQAVCASGTMLRWLRDFVLPTAXCQDAEQPTRYETLFQALDRNGDGVVDIGELQEGLRNLGIPLGQDAEEKIFTTGDVNKDGKLDFEEFMKYLKDHEKKMKLAFKSLDKNNDGKIEASEIVQSLQTLGLTISEQQAELILQSIDVDGTMTXDWNEWRDYFLFNPXTDIEEIIRFWKHSTGIDIGDSLTIPDEFTEDEKKSGQWWRQLLAGGIAGAXSXTSTGPLDRLKIMMQVTGQNQTK

SEQ ID NO: 1009 - protein, 168 aa, Homo sapiens
  SITE (22): Xaa equals any of the naturally occurring L-amino acids
  SITE (55): Xaa equals any of the naturally occurring L-amino acids
  SITE (76): Xaa equals any of the naturally occurring L-amino acids
  SITE (77): Xaa equals any of the naturally occurring L-amino acids
  SITE (147): Xaa equals any of the naturally occurring L-amino acids
  SITE (159): Xaa equals any of the naturally occurring L-amino acids
  SITE (165): Xaa equals any of the naturally occurring L-amino acids
QGKLRTMMAQFPTAMNGGPNMXAITSEERTKHDRQFDNLKPSGGYITGDQARNFXLQSGLPAPVLAEIWALSDLNXXGKMDQQEFSIAMKLIKLKLQGQQLPVVLPPIMKQPPMFSPLISARFGMGSMPNLSIPQPLPPAAPITSLXSATSGTNLSSLXDAHSPXAFC

SEQ ID NO: 1010 - protein, 372 aa, Homo sapiens
LLSGLLLLTLAIAVLNTLVPLWLAQEHMSTWQVGVVSSSYFTGNLVGTLLTGYVIKRIGFNRSYYLASFIFAAGCAGLGLMIGFWSWLAWRFVAGVGCAMIWVVVESALMCSGTSRNRGRLLAAYMMVYYVGTFLGQLLVSKVSTELMSVLPWVTGLTLAGILPLLFTRVLNQQAENHDSTSITSMLKLRQARLGVNGCIISGIVLGSLYGLMPLYLNHKGVSNASIGFWMAVLVSAGILGQWPIGRLADKFGRLLVLRVQVFVVILGSIAMLSQAAMAPALFILGAAGFTLYPVAMAWACEKVEHHQLVAMNQALLLSYTVGSLLGPSFTAMLMQNFSDNLLFIMIASVSFIYLLMLLRNAGHTPKPVAHV

SEQ ID NO: 1011 - protein, 145 aa, Homo sapiens
  SITE (7): Xaa equals any of the naturally occurring L-amino acids
FLSGLLXLTLAIAVLNTLVPLWLAQEHMSTWQVGVVSSSYFTGNLVGTLLTGYVIKRIGFNRSYYLASFIFAAGCAGLGLMIGFWSWLAWRFVAGVGCAMIWVVVESALMCSGTSRNRGRLLAAYMMVITWERFRPLLVSKFQPS

SEQ ID NO: 1012 - protein, 150 aa, Homo sapiens
  SITE (82): Xaa equals any of the naturally occurring L-amino acids
  SITE (120): Xaa equals any of the naturally occurring L-amino acids
  SITE (122): Xaa equals any of the naturally occurring L-amino acids
  SITE (130): Xaa equals any of the naturally occurring L-amino acids
  SITE (149): Xaa equals any of the naturally occurring L-amino acids
AMPALVSGWRYWSVRVSLDNGRLDVWRISLVDCWCCVFRSLSSFSAVSRCLARRRWPQRYSSSVPLALRYIPVAMAWACEKXEHHQLVAMNPGLTVELYCGKSAWPVITAMLMQNFSDNXLXIMIASVSXIYLLMLLRNAGHTPKPVAXV

SEQ ID NO: 1013 - protein, 146 aa, Homo sapiens
  SITE (2): Xaa equals any of the naturally occurring L-amino acids
  SITE (5): Xaa equals any of the naturally occurring L-amino acids
  SITE (16): Xaa equals any of the naturally occurring L-amino acids
PXLVXIFAIICIGCRXVAGMVGRLKFMILPMVAFGGKAVEGKGYYYPPTLLLDVRQEMSIMHEETFGPVLPVVAFDTLEDAISMANDSDYGLTSSIYTQNLNVAMKAIKGLKFGETYINRENFEAMQGFHAGWRKSGIGGADGKHG

SEQ ID NO: 1014 - protein, 83 aa, Homo sapiens
ERANNSDFGLVAAVFTNDINKALTVSSAMQAGTVWINCYNALNAQSPFGGFKMSGNGREMGEFGLREYSEVKTVTVKIPQKNS

SEQ ID NO: 1015 - protein, 71 aa, Homo sapiens
MASKKREVQLQTVINNQSLWDEMLQNKGLTVIDVYQAWCGPCRAMQPLFRKLKNELNEDEILHFAVKLTTL

SEQ ID NO: 1016 - protein, 156 aa, Homo sapiens
  SITE (139): Xaa equals any of the naturally occurring L-amino acids
  SITE (144): Xaa equals any of the naturally occurring L-amino acids
  SITE (146): Xaa equals any of the naturally occurring L-amino acids
  SITE (150): Xaa equals any of the naturally occurring L-amino acids
LTRIFKISDQDNDGTLNDAELNFFQRICFNTPLAPQALEDVKNVVRKHISDGVADSGLTLKGFLFLHTLFIQRGRHETTWTVLRRFGYDDDLDLTPEYLFPLLKIPPDCTTELNHHAYLFLKAPLTSMIWIETVLCHLXSLKIXLXFSLXYLGGQM

SEQ ID NO: 1017 - protein, 132 aa, Homo sapiens
  SITE (76): Xaa equals any of the naturally occurring L-amino acids
  SITE (85): Xaa equals any of the naturally occurring L-amino acids
  SITE (102): Xaa equals any of the naturally occurring L-amino acids
RKWKKRKTATKKGTAAPYFNEAFTFLVPFSQVQNVDLVLAVWDRSLPLRTEPVGKVHLGARASGQPLQHWADMLAXARRPLPSGXPCGSQGGGPHAGPAAPXSPAPALAPLLNAPHASVSPLSPGTCPGRPA

SEQ ID NO: 1018 - protein, 116 aa, Homo sapiens
  SITE (28): Xaa equals any of the naturally occurring L-amino acids
  SITE (114): Xaa equals any of the naturally occurring L-amino acids
AEEEISIQQDEDLVIFSETSLDGWLQGXNSRGETGLFPASYVEIVRSGISTNHADYSSSPAGFSRSPGELVTTAPVWPAQLGVVGAVASSQTRVALRRMMDDGLGMTGDDGCTXVG

SEQ ID NO: 1019 - protein, 234 aa, Homo sapiens; identical to SEQ ID NO: 708

SEQ ID NO: 1020 - protein, 119 aa, Homo sapiens
LLIIIAVLGYIYSIQTTEWAILIYGLVMIFFLYMYVCFASAVYIPELWPTHLRLRGSGFVNAVGRIVAVFTPYGVAALLTHYGSITVFMVLGVMLLLCALVLSIFGIETRKVSLEEILR

SEQ ID NO: 1021 - protein, 133 aa, Homo sapiens
MVKSGISGRWNSGFTAEADQLELLSRSKTVTVPKVWAVGADRDYSFLVMDYLPPRPLDAHSAFILGQQIARLHQWSDQPQFGLDFDNALSTTPQPNTWQRRWSTFFAEQRIGWQLELAAEKGIAFGNIDAIVE

SEQ ID NO: 1022 - protein, 228 aa, Homo sapiens
  SITE (7): Xaa equals any of the naturally occurring L-amino acids
  SITE (10): Xaa equals any of the naturally occurring L-amino acids
  SITE (26): Xaa equals any of the naturally occurring L-amino acids
  SITE (29): Xaa equals any of the naturally occurring L-amino acids
KAQKLFXTAXAAALELVDPPGCRNKXMNXKIHSLALLVNLGIYGVAQAQEPTDTPVSHDDTIVVTAAEQNLQAPGVSTITADEIRKNPVARDVSKIIRTMPGVNLTGNSTSGQRGNNRQIDIRGMGPENTLILIDGKPVSSRNSVRQGWRGERDTRGDTSWVPPEMIERIEVLRGPAAARYGNGAAGGVVNIITKKGSGEWHGSWDAYFNAPEHKEEGATKRTNFSLT

SEQ ID NO: 1023 - protein, 158 aa, Homo sapiens
  SITE (141): Xaa equals any of the naturally occurring L-amino acids
  SITE (145): Xaa equals any of the naturally occurring L-amino acids
  SITE (147): Xaa equals any of the naturally occurring L-amino acids
  SITE (150): Xaa equals any of the naturally occurring L-amino acids
  SITE (157): Xaa equals any of the naturally occurring L-amino acids
EGPGKENTKTEVTVFYHLTSKVTPYHFCCLLVIRSVLVTLWIIDRLGRKKTMALCFVIFSFCSLLLFICVGRNVLTLLLFIARAFISGGFQAAYVYTPEVYPTGRALGLGTCSGMARVGALITPFIAQVMLESSVYLTLAXLQWXLXPGXPGLLLFXH

SEQ ID NO: 1024 - protein, 105 aa, Homo sapiens
  SITE (84): Xaa equals any of the naturally occurring L-amino acids
  SITE (101): Xaa equals any of the naturally occurring L-amino acids
  SITE (105): Xaa equals any of the naturally occurring L-amino acids
EHPGQELEIELFDEDPDKDDFLGSLMIDLIEVEKERLLDEWFTLDEVPKGKLHLRLEWLTLMPNASNLDKVLTDIKADKDQANXGLSSALLILLLGIPARXPSGX

SEQ ID NO: 1025 - protein, 92 aa, Homo sapiens; identical to SEQ ID NO: 714

SEQ ID NO: 1026 - protein, 99 aa, Homo sapiens
  SITE (15): Xaa equals any of the naturally occurring L-amino acids
  SITE (16): Xaa equals any of the naturally occurring L-amino acids
RNEMEKYERIRVVGXXAFGIVHLCLRKADQKLVIIKQIPVEQMTKEERQAAQNECQVLKLLNHPNVIEYYENFLEDKALMIAMEYAPGGTLAEFIQKRC

SEQ ID NO: 1027 - protein, 179 aa, Homo sapiens
  SITE (79): Xaa equals any of the naturally occurring L-amino acids
ATQLPGGPGTSCLPSTQSGADLPWSFSGATSKVRALVRLACRMAGQPGHMPHGGSSNNLCHTLGPVHPPDPQRHPNTLXFRCSLADFQIEKKIGRGQFSEVYKATCLLDRKTVALKKVQIFEMMDAKARQDCVKEIGLLKQLNHPNIIKYLDSFIEDNELNIVLELADAGDLFADDQVL

SEQ ID NO: 1028 - protein, 100 aa, Homo sapiens
YAWYFDFCPDSQSTDQAASCQETVIHVKAHFDYDPSDDPYVPCRELGLSFQKGDILHVISQEDPNWWQAYREGDEDNQPLAGLVPGKTQYGRKYIILKEH

SEQ ID NO: 1029 - protein, 137 aa, Homo sapiens
  SITE (116): Xaa equals any of the naturally occurring L-amino acids
WNSGCQLVALNFQTPGYEMDLNAGRFLVNGQCGYVLKPACLRQPDSTFDPEYPGPPRTTLSIQVLTAQQLPKLNAEKPHSIVDPLVRIEIHGVPADCARQETDYVLNNGFNPRWGXDPAVPAAGSGAGTGPVCGGRL

SEQ ID NO: 1030 - protein, 151 aa, Homo sapiens
  SITE (134): Xaa equals any of the naturally occurring L-amino acids
REQKLELHRGGGRSRTSGSPGLQEFGTRFYSHCFWAEGAGKEPRGHLTWSLSTGLGCVTLSFLISLYYNTIVAWVLWYLLNSFQHPLPWSSCPPDLNRTGELGAACCVGPCTAERGMCCSVSSIRAAAGGGCSXRGEGRGTVALCAHARAS

SEQ ID NO: 1031 - protein, 263 aa, Homo sapiens
KDEKTAQTRESHAKADSAVSQEQLRKLQERVERCAKEAEKTKAQYEQTLAELHRYTPRYMEDMEQAFETCQAAERQRLLFFKDMLLTLHQHLDLSSSEKFHELHRDLHQGIEAASDEEDLRWWRSTHGPGMAMNWPQFEEWSLDTQRTISRKEKGGRSPDEVTLTSIVPTRDGTAPPPQSPGSPGTGQDEEWSDEESPRKAATGVRVRALYDYAGQEADELSFRAGEELLKMSEEDEQGWCQGQLQSGRIGLYPANYVECVGA

SEQ ID NO: 1032 - protein, 138 aa, Homo sapiens
  SITE (11): Xaa equals any of the naturally occurring L-amino acids
  SITE (69): Xaa equals any of the naturally occurring L-amino acids
  SITE (130): Xaa equals any of the naturally occurring L-amino acids
EHPFLVNLWYXFQDEEDMFMVVDLLLGGDLRYHLQQNVHFTEGTVKLYICELALALEYLQRYHIIHRDXKPDNILLDEHGHVHITDFNIATVVKGAERASSMAGTKPYMAPEVFQVYMDRGPGYSYPVDXRSLGITAY

SEQ ID NO: 1033 - protein, 237 aa, Homo sapiens
  SITE (16): Xaa equals any of the naturally occurring L-amino acids
  SITE (227): Xaa equals any of the naturally occurring L-amino acids
  SITE (232): Xaa equals any of the naturally occurring L-amino acids
  SITE (236): Xaa equals any of the naturally occurring L-amino acids
MNAAKRLCRRYSQKLXQHTACQLLRTYPAATRIDSSNPNPLMFWLHGIQLVALNYQTDDLPLHLNAAMFEANGGCGYVLKPPVLWDKNCPMYQKFSPLERDLDSMDPAVYSLTIVSGQNVCPSNSMGSPCIEVDVLGMPLDSCHFRTKPIHRNTLNPMWNEQFLFHVHFEDLVFLRFAVVENNSSAVTAQRIIPLKALKRGYRHLQLRNLHNEVLEISSLFINSRRXGRKFXWQYXV

SEQ ID NO: 1034 - protein, 237 aa, Homo sapiens
  SITE (159): Xaa equals any of the naturally occurring L-amino acids
  SITE (160): Xaa equals any of the naturally occurring L-amino acids
AMLQATCGTPIYMAPEVISAHDYSQQCDIWSIGVVMYMLLRGEPPFLASSEEKLFELIRKGELHFENAVWNSISDCAKSVLKQLMKVDPAHRITAKELLDNQWLTGNKLSSVRPTNVLEMMKEWKNNPESVEENTTEEKNKPSTEEKLKSYQPWGNVPXXNYTSDEEEEKQSTAYEKQFPATSKDNFDMCSSSFTSSKLLPAEIKGEMEKTPVTPSQGTATKYPAKSGALSRTKKKL

SEQ ID NO: 1035 - protein, 219 aa, Homo sapiens
  SITE (74): Xaa equals any of the naturally occurring L-amino acids
  SITE (162): Xaa equals any of the naturally occurring L-amino acids
  SITE (163): Xaa equals any of the naturally occurring L-amino acids
  SITE (209): Xaa equals any of the naturally occurring L-amino acids
LARPDTDQQMGAVFVAPEVVGRQRYGRPVDCWAIGVIMYILLSGNPPFYEEVEEDDYENHDKNLFRKILAGDYXFDSPYWDDISQAAKDLVTRLMEVEQDQRITAEEAISHEWISGNAASDKNIKDGVCAQIEKNFARAKWKKAVRVTTLMKRLRAPEQSSXXAAQSASATDTATPGAADRKCPPQPQMEVPPQPLMAVSPQPPMEASXQPLMGSVTPA

SEQ ID NO: 1036 - protein, 265 aa, Homo sapiens
  SITE (146): Xaa equals any of the naturally occurring L-amino acids
  SITE (155): Xaa equals any of the naturally occurring L-amino acids
  SITE (158): Xaa equals any of the naturally occurring L-amino acids
  SITE (168): Xaa equals any of the naturally occurring L-amino acids
CLWPPAPELLEQKPYGKAVDVWALGVISYILLCGYPPFYDESDPELFSQILRASYEFDSPFWDDISESAKDFIRHLLERDPQKRFTCQQALRHLWISGDTAFDRDILGSVSEQIRKNFARTHWKRAFNATSFLRHIRKLGQIPEAXGPLSRAWPXTAXQASVLASPPXGDAQLRMGPRVDADLGTPPFRGHHRDASRMPLCQPDTRTFVKNSNRQERQRVTRLCPVIGWHMLTSCQTTSTRVIHVHLQQPARYSLCDFSVCVCVS

SEQ ID NO: 1037 - protein, 253 aa, Homo sapiens
  SITE (78): Xaa equals any of the naturally occurring L-amino acids
  SITE (82): Xaa equals any of the naturally occurring L-amino acids
  SITE (112): Xaa equals any of the naturally occurring L-amino acids
  SITE (139): Xaa equals any of the naturally occurring L-amino acids
  SITE (219): Xaa equals any of the naturally occurring L-amino acids
  SITE (234): Xaa equals any of the naturally occurring L-amino acids
  SITE (242): Xaa equals any of the naturally occurring L-amino acids
  SITE (253): Xaa equals any of the naturally occurring L-amino acids
SNCSGVEGDVTDEDEGAEMSQRMGKENMEQPNNVPVKRFQLCKELSELVSICKSVQFKEFQVSFQVQKYWEVCSFNEXLASXYANENPGDFVNYNKRFLARVFPSPMRIDSXNMNPQDFWKCGCQIVAMNFQTPGLMMXLNIGWFRQNGNCGYVLRPAIMREEVSFFSANTKDSVPGVSPQLLHIKIISGQNFPKPKGSGAKGGCGRSLCLCWKSWDSXLIVAEQRTKTVAPDXETFPIFGXKFLNFQNQPGX

SEQ ID NO: 1038 - protein, 158 aa, Homo sapiens
  SITE (29): Xaa equals any of the naturally occurring L-amino acids
  SITE (34): Xaa equals any of the naturally occurring L-amino acids
  SITE (89): Xaa equals any of the naturally occurring L-amino acids
  SITE (115): Xaa equals any of the naturally occurring L-amino acids
  SITE (122): Xaa equals any of the naturally occurring L-amino acids
  SITE (137): Xaa equals any of the naturally occurring L-amino acids
LQVISGQQLPKVDKTKEGSIVDPLVKVQXFGVRXDTARQETNYVENNGFNPYWGQTLCFRVLVPELAMLRFVVMDYDWKSRNDFIGQYXLPWTCMQQGEPAPLTPGQYPSSGCLXNAVLLPXPGYRHIHLLSKDGIXLSPASIFVYICIQEGLEGDES

SEQ ID NO: 1039 - protein, 136 aa, Homo sapiens
  SITE (33): Xaa equals any of the naturally occurring L-amino acids
TVANCSSKDLQSSQGGQQPRVQSWSPPVRGIPXLPCAKALYNYEGKEPGDLKFSKGDIIILRRQVDENWYHGEVNGIHGFFPTNFVQIIKPLPQPPPQCKAFYDFEVKDKEADKDCLPFAKDDVLTVIRRVDENWG

SEQ ID NO: 1040 - protein, 130 aa, Homo sapiens
  SITE (9): Xaa equals any of the naturally occurring L-amino acids
  SITE (121): Xaa equals any of the naturally occurring L-amino acids
  SITE (126): Xaa equals any of the naturally occurring L-amino acids
KRPRGRRRXGMAGPGWGPPRLDGFILTERLGSGTYATVYKAYAKKDTREVVAIKCVAKKSLNKASVENLLTEIEILKGIRHPHIVQLKDFQWDSDNIYLIMEFCAGGDLSRFIHTRRFCLXRWRVXSCSN

SEQ ID NO: 1041 - protein, 333 aa, Homo sapiens
LPLPEDPGTLSAERRCLTQPVEDQGVSTQLLAPSGSVCFSYTGTPWKLFLRKEVFYPRENFSHPYYLRLLCEQILRDTFSESCIRISQNERRKMKDLLGGLEVDLDSLTTTEDSVKKRIVVAARDNWANYFSRFFPVSGESGSDVQLLAVSHRGLRLLKVTQGPGLRPDQLKILCSYSFAEVLGVECRGGSTLELSLKSEQLVLHTARARAIEALVELFLNELKKDSGYVIALRSYITDNCSLLSFHRGDLIKLLPVATLEPGWQFGSAGGRSGLFPADIVQPAAAPDFSFSKEQRSGWHKGQLSNGEPGLARWDRASEVRKMGEGQAEARPA

SEQ ID NO: 1042 - protein, 121 aa, Homo sapiens; identical to SEQ ID NO: 734
  SITE (75): Xaa equals any of the naturally occurring L-amino acids
  SITE (98): Xaa equals any of the naturally occurring L-amino acids

SEQ ID NO: 1043 - protein, 142 aa, Homo sapiens
  SITE (119): Xaa equals any of the naturally occurring L-amino acids
  SITE (132): Xaa equals any of the naturally occurring L-amino acids
DSPSPEEDKEEHISLAHRGVDASKKTSKTVTISQVSDNFVREIKKEMKKDPLTNKAPEKPLHEVPSGNSLLSSETILRTNKRGERRRRRCQVAFSYLPQNDDELELKVGDIIEVVGEVXEGWWEGVLNGKTXMFPSTSSRTC

SEQ ID NO: 1044 - protein, 186 aa, Homo sapiens
  SITE (76): Xaa equals any of the naturally occurring L-amino acids
  SITE (152): Xaa equals any of the naturally occurring L-amino acids
  SITE (158): Xaa equals any of the naturally occurring L-amino acids
  SITE (165): Xaa equals any of the naturally occurring L-amino acids
  SITE (168): Xaa equals any of the naturally occurring L-amino acids
  SITE (169): Xaa equals any of the naturally occurring L-amino acids
  SITE (173): Xaa equals any of the naturally occurring L-amino acids
QIDEFVHTESSSTKMQLVKQRLETVTEVIRSCAAKVNKNLSFTSPPAVSSQQSKLKQSNMLTAQEILHQFGFTQTXIISIERKPCNHQVDTAPTVVALYDYTANRSDELTIHRGDIIRVFFKDNEDWWYGSIGKGQEGYFPANHVASETLYXELPPEXKERSPPXSPXXKTKXEKSPASQKVQYNT

SEQ ID NO: 1045 - protein, 244 aa, Homo sapiens
EGKAAGMFNPHALDSPAVIFDNGSGFCKAGLSGEFGPRHMVSSIVGHLKFQAPSAEANQKKYFVGEEALYKQEALQLHSPFERGLITGWDDVERLWKHLFEWELGVKPSDQPLLATEPSLNPRENREKMAEVMFENFGVPAFYLSDQAVLALYASACVTGLVVDSGDAVTCTVPIFEGYSLPHAVTKLHVAGRDITELLMQLLLASGTPSPASWTRVSWTTSKRSCATWPWSPRRSFPGGRRRS

SEQ ID NO: 1046 - protein, 137 aa, Homo sapiens
  SITE (110): Xaa equals any of the naturally occurring L-amino acids
  SITE (119): Xaa equals any of the naturally occurring L-amino acids
GTSHCQLPVVIDNGSGMIKAGVAGCREPQFIYPNIIGRAKGQSRAAQGGLELCVGDQAQDWRSSLFISYPVERGLITSWEDMEIMWKHIYDYNLKLKPCDGPVLITEPAXNPLANRQQXTEIFLSIWVFLPSICPSR

SEQ ID NO: 1047 - protein, 382 aa, Homo sapiens
  SITE (51): Xaa equals any of the naturally occurring L-amino acids
  SITE (381): Xaa equals any of the naturally occurring L-amino acids
ELSKSGAALDNMWAPPAAIMGDGPTKKVGNQAPLQTQALQTASLRDGPAKXAVWVRHTSSEPQEPTESKAAKERPKQEVTKAVVVDLGTGYCKCGFAGLPRPTHKISTTVGKPYMETAKTGDNRKETFVGQELNNTNVHLKLVNPLRHGIIVDWDTVQDIWEYLFRQEMKIAPEEHAVLVSDPPLSPHTNREKYAEMLFEAFNTPAMHIAYQSRLSMYSYGRTSGLVVEVGHGVSYVVPIYEGYPLPSITGRLDYAGSDLTAYLLGLLNSAGNEFTQDQMGIVEDIKKKCCFVALDPIEEKKVPLSEHTIRYVLPDGKEIQLCQERFLCSEMFFKPSLIKSMQLGLHTQTVSCLNKCDIALKRDLMGNILLCGGSTMLSGXP

SEQ ID NO: 1048 - protein, 124 aa, Homo sapiens
  SITE (13): Xaa equals any of the naturally occurring L-amino acids
  SITE (109): Xaa equals any of the naturally occurring L-amino acids
  SITE (121): Xaa equals any of the naturally occurring L-amino acids
DRGREVSGRLSRXARRSGAFSPAAGPSPKVASVSGSRRVHRPSSLGRIAVVVDQGSGFTKAGFAGENQPRIVLKSFSLVPSWDRPVLPGAPGCELAGGVARAHPIKHGXGGGLGGAGRAVXAPA

SEQ ID NO: 1049 - protein, 133 aa, Homo sapiens
  SITE (7): Xaa equals any of the naturally occurring L-amino acids
  SITE (31): Xaa equals any of the naturally occurring L-amino acids
  SITE (33): Xaa equals any of the naturally occurring L-amino acids
  SITE (74): Xaa equals any of the naturally occurring L-amino acids
RGSLERXGKNLDISVQKEMVLRQWVRGPCIXEXPSGVNFVWTSSSTTLVSLRRPLFASSLHLPRHLTYPDIAFXGQNEGTISVVEGETLYVIEEDKGDGWTRIRRNEDEEGYVPTSYVEVCLDKNAKGAKTYI

SEQ ID NO: 1050 - protein, 276 aa, Homo sapiens
  SITE (223): Xaa equals any of the naturally occurring L-amino acids
MQRDHTMDYKESCPSVSIPSSDEHREKKKRFTVYKVLVSVGRSEWFVFRRYAEFDKLYNTLKKQFPAMALKIPAKRIFGDNFDPDFIKQRRAGLNEFIQNLVRYPELYNHPDVRAFLQMDSPKHQSDPSEDEDERSSQKLHSTSQNINLGPSGNPHAKPTDFDFLKVIGKGSFGKVLLAKRKLDGKFYAVKVLQKKIVLNRKEQKHIMAERNVLLKNVKHPFXVGLHYSFQTTEKLYFVLDFVNGGELFFHLQRKENSSLLQRGVLEKWVTPVGLI

SEQ ID NO: 1051 - protein, 436 aa, Homo sapiens
  SITE (24): Xaa equals any of the naturally occurring L-amino acids
  SITE (123): Xaa equals any of the naturally occurring L-amino acids
  SITE (267): Xaa equals any of the naturally occurring L-amino acids
  SITE (330): Xaa equals any of the naturally occurring L-amino acids
DIIKELPETVIDLLNKCLTFHPSXRPTPDELMKDKVFSEVSPLYTPFTKPASLFSSSLRCADLTLPEDISQLCKDINNDYLAERSIEEVYYLWCLAGGDLEKELVNKEIIRSKPPICTLPNFXFEDGESFGQGRDRSSLLDDTTVTLSLCQLRNRLKDVGGEAFYPLLEDDQSNLPHSNSNNELSAAATLPLIIREKDTEYQLNRIILFDRLLKAYPYKKNQIWKEARVDIPPLMRGLTWAALLGVEGAIHAKYDAIDKDTPIPTDXQIEVDIPRCHQYDELLSSPEGHAKFRRVLKAWVVSHPDLVYWQGLDSLCAPFLYLNFNNEALXYACMSAFIPKYLYNFFLKDNSHVIQEYLTVFSQMIAFHDPELSNHLNEIGFIPDLYAIPWFLTMFTHVFPLHKIFHLWDTLLLGNSSFPFCIGVGNSSAAAGPAFG

SEQ ID NO: 1052 - protein, 128 aa, Homo sapiens
EEREIGPIIRSLGCCPTEGELHDLIAEVEEEEPTGYIRFEKFLPVMTEILLERKYRPIPEDVLLRAFEVLDSAKRGFLTKDELIKYMTEEGEPFSQEEMEEMLSAAIDPESNSINYKDYITMMVIDEN

SEQ ID NO: 1053 - protein, 340 aa, Homo sapiens
  SITE (274): Xaa equals any of the naturally occurring L-amino acids
  SITE (289): Xaa equals any of the naturally occurring L-amino acids
  SITE (296): Xaa equals any of the naturally occurring L-amino acids
  SITE (307): Xaa equals any of the naturally occurring L-amino acids
  SITE (319): Xaa equals any of the naturally occurring L-amino acids
EENKARVIFITEYMSSGSLKQFLKKTKKNHKTMNEKAWKRWCTQILSALSYLHSCDPPIIHGNLTCDTIFIQHNGLIKIGSVAPDTINNHVKTCREEQKNLHFFAPEYGEVTNVTTAVDIYSFGMCALEMAVLEIQGNGESSYVPQEAISSAIQLLEDPLQREFIQKCLQSEPARRPTARELLFHPALFEVPSLKLLAAHCIVGHQHMIPENALEEITKNMDTSAVLAEIPAGPGREPVQTLYSQSPALELDKFLEDVRNGIYPLTAFGLPRPXQPQQEEVTSPVVPPXVKDFHTXTSLRWRLARWXLDAVQHWSPVEXGSQTPTGHFWLKLEGQTGPGT

SEQ ID NO: 1054 - protein, 230 aa, Homo sapiens
  SITE (209): Xaa equals any of the naturally occurring L-amino acids
  SITE (210): Xaa equals any of the naturally occurring L-amino acids
  SITE (216): Xaa equals any of the naturally occurring L-amino acids
  SITE (223): Xaa equals any of the naturally occurring L-amino acids
ERENNYGCGVVGGEMTTLVLDNGAYNAKIGYSHENVSVIPNCQFRSKTARLKTFTANQIDEIKDPSGLFYILPFQKGYLVNWDVQRQVWDYLFGKEMYQVDFLDTNIIITEPYFNFTSIQESMNEILFEEYQFQAVLRVNAGALSAHRYFRDNPSELCCIIVDSGYSFTHIVPYCRSKKKKEAIIRINVGGKLLTNHLKEIISYRLKGXXNTVMIXYVLPDFXTIKKGFC

SEQ ID NO: 1055 - protein, 303 aa, Homo sapiens
  SITE (4): Xaa equals any of the naturally occurring L-amino acids
CSEXGFPYRECQLTNKMDCLLLQHLKETFCHLDQDISGLQDHEFQIRHPDSPALLYQFRLGDEKLQAPMALFYPATFGIVGQKMTTLQHRSQGDPEDPHDEHYLLATQSKQEQSAKATADRKSASKPIGFEGDLRGQSSDLPERLHSQEVDLGSAQGDGLMAGNDSEEALTALMSRKTAISLFEGKALGLDKAILHSIDCCSSDDTKKKMYSSILVVGGGLMFHKAQEFLQHRILNKMPPSFRRIIENVDVITRPKDMDPRLIAWKGGAVLACLDTTQELWIYQREWQRFGVRMLRERAAFVW

SEQ ID NO: 1056 - protein, 167 aa, Homo sapiens
ATRAAEHLLPGPPPSLADFRLEAGGKGTERGSGSSKPTGSSRGPRMAKFLSQDQINEYKECFSLYDKQQRGKIKATDLMVAMRCLGAARRQGRCSGTADPRDRRKWRAGFLHFSDHYAHANKTRRPKERNSSSHVDGGQGEERLRHGVRPAVKTHESGGEAHPQGSG

SEQ ID NO: 1057 - protein, 148 aa, Homo sapiens
QPRPQNEYKECFSLYDKQQRGKIKATDLMVAMRCLGASPTPGEVQRHLQTHGIDGNGELDFSTFLTIMHMQIKQEDPKKEILLAMLMVDKEKKGYVMASDLRSKLTSLGEKLTHKEVDDLFREADIEPNGKVKYDEFIHKITLPGRDY

SEQ ID NO: 1058 - protein, 191 aa, Homo sapiens
  SITE (36): Xaa equals any of the naturally occurring L-amino acids
  SITE (176): Xaa equals any of the naturally occurring L-amino acids
EASNGFKVGTTRFTFWCEVYFHYRRIKTFSAARKLXDVAFQIINDELYLDGNARQNLATFCQTWDDENVHKLMDLSINKNWIDKEEYPQSAAIDLRCVNMVADLWHAPAPKNGQAVGTNTIGSSEACMLGGMAMKWRWRKRMEAAGKPTDKPNLVCGPVQICWHKFARYWECGAAXNPYGPPVSCLWTRNA

SEQ ID NO: 1059 - protein, 234 aa, Homo sapiens; identical to SEQ ID NO: 756

SEQ ID NO: 1060 - protein, 129 aa, Homo sapiens
  SITE (68): Xaa equals any of the naturally occurring L-amino acids
LTRTPPFSPALPPARGVPGSAVLLFEVELVSREDGLPTGYLFVWHKDPPANLFEDMDLNKDGEVPPEXFSTFIKAQVSEGKGRLMPGQDPEKTIGDMFQNQDRNQDGKITVDELKLKSDEDEERVHEEL

SEQ ID NO: 1061 - protein, 182 aa, Homo sapiens; identical to SEQ ID NO: 758

SEQ ID NO: 1062 - protein, 124 aa, Homo sapiens
  SITE (56): Xaa equals any of the naturally occurring L-amino acids
ITRNTRNKGACSSRRSVSPWRTEFIICVLSLGSLAFADACTSSSVTPKMFVHFLSXNHMISLVGCMIQFYIFASGANTGSFLLVVMAYDCYMAICNPLLYPLVMSNTFCIQLSGVSFIIVFFIL

SEQ ID NO: 1063 - protein, 176 aa, Homo sapiens
  SITE (133): Xaa equals any of the naturally occurring L-amino acids
AQIYSVAIFLGINLAAFIIIVFSYGSMFYSVHQSAITATEIRNQVKKEMILAKRFFFIVFTDALCWIPIFVVKFLSLLQVEIPGTITSWVVIFILPINSALNPILYTLTTRPFKEMIHRFWYNYRQRKSMDSXGQKTYAPSFIWVEMWPLQEMPPELMKPDLFTYPCEMSLISQST

SEQ ID NO: 1064 - protein, 173 aa, Homo sapiens
  SITE (162): Xaa equals any of the naturally occurring L-amino acids
ERMLHVVDGKVPDTLRKCFSEGEKVNYEKFRNWLFLNKDAFTFSRWLLSGGVYVTLTDDSDTPTFYQTLAGVTHLEESDIIDLEKRYWLLKAQSRTGRFDLETFGPLVSPPIRPSLSEGLFNAFDENRDNHIDFKEISCGLSACCRGPLAERQKFCFKVFDXDRDGSSLQGLN

SEQ ID NO: 1065 - protein, 595 aa, Homo sapiens
  SITE (4): Xaa equals any of the naturally occurring L-amino acids
  SITE (36): Xaa equals any of the naturally occurring L-amino acids
  SITE (38): Xaa equals any of the naturally occurring L-amino acids
  SITE (90): Xaa equals any of the naturally occurring L-amino acids
  SITE (272): Xaa equals any of the naturally occurring L-amino acids
  SITE (533): Xaa equals any of the naturally occurring L-amino acids
LGGXFERFETGNVQLAQQLLHYHAIQASTQEEALAXWXPMGVIGLILPPTFSFLEMMWRICPALAVGCTVVALVPPASPAPLLLAQLAGXLGPFPGILNVVSGPASLVPILASQPGIRKVAFCGAPEEGRALRRSLAGECAELGLALGTESLLLLTDTADVDSAVEGVVDAAWSDRGPGGLRLLIQESVWDEAMRRLQERMGRLRSGRGLDGAVDMGARGAAACDLVQRFVREAQSQGAQVFQAGDVPSERPFYPPTLVSNLPPASPCAQVXVPWPVVVASPFRTAKEALLVANGTPRGGSASVWSERLGQALELGYGLQVGTVWINAHGLRDPSVPTGGCKESGCSWHGGPDGLYEYLRPSGTPARLSCLSKNLNYDTFGLAVPSTLPAGPEIGPSPAPPYGLFVGGRFQAPGARSSRPIRDSSGNLHGYVAEGGAKDIRGAVEAAHQAFPGWAGQSPGARAALLWALAAALERRKSTLASRLERQGAELKAAEAEVELSARRLRAWGARVQAQGHTLQVAGLRGPVLRLRXPLGVLAVVCPDEWPLLAFVSLLAPALAYGNTVVMVPSAAVLCWPWRSARTWPPCSQQAWPTW

SEQ ID NO: 1066 - protein, 135 aa, Homo sapiens
SPLAGAPSGKVYLGQKGGKLYAVKVVKKADMINKNMTHQVQAERDALALSKSPFIVHLYYSLQSANNVYLVMEYLIGGDVKSLLHIYGYFDEEMAVKYISEVALALDYLHRHGIIHRDLKPDNMLISNEGHIKLT

SEQ ID NO: 1067 - protein, 185 aa, Homo sapiens
  SITE (39): Xaa equals any of the naturally occurring L-amino acids
  SITE (53): Xaa equals any of the naturally occurring L-amino acids
  SITE (57): Xaa equals any of the naturally occurring L-amino acids
  SITE (61): Xaa equals any of the naturally occurring L-amino acids
  SITE (69): Xaa equals any of the naturally occurring L-amino acids
  SITE (72): Xaa equals any of the naturally occurring L-amino acids
  SITE (116): Xaa equals any of the naturally occurring L-amino acids
  SITE (137): Xaa equals any of the naturally occurring L-amino acids
  SITE (142): Xaa equals any of the naturally occurring L-amino acids
PPAAALQWLALFTGPEQGRRCCGGDLLSLSYLPTAERLXVVVVKAKNLIWTNXKTTXDPFXKVYLLQDXRKXSKKKTAVKRDDPNPVFNEAMIFSVPAIVLQDLSLRVTVAESSSXGRGDNVGHVIIGPSASAWEPXIGTRXWPRCAGPCPCGTLSGETSNQGGPVGQWSCWSPVPTQLCLMPSP

SEQ ID NO: 1068 - protein, 348 aa, Homo sapiens
  SITE (3): Xaa equals any of the naturally occurring L-amino acids
  SITE (7): Xaa equals any of the naturally occurring L-amino acids
  SITE (22): Xaa equals any of the naturally occurring L-amino acids
VTXGKVXLQVPVRNSRVDPRVXSSVSGSVMSVYSGDFGNLEVKGNIQFAIEYVESLKELHVFVAQCKDLAAADVKKQRSDPYVKAYLLPDKGKMGKKKTLVVKKTLNPVYNEILRYKIEKQILKTQKLNLSIWHRDTFKRNSFLGEVELDLETWDWDNKQNKQLRWYPLKRKTAPVALEAENRGEMKLALQYVPEPVPGKKLPTTGEVHIWVKECLDLPLLRGSHLNSFVKCTILPDTSRKSRQKTRAVGKTTNPIFNHTMVYDGFRPEDLMEACVELTVWDHYKLTNQFLGGLRIGFGTGKSYGTEVDWMDSTSEEVALWEKMVNSPNTWIEATLPLRMLLIAKISK

SEQ ID NO: 1069 - protein, 148 aa, Homo sapiens
LKAMDSNGLSDPYVKFRLGHQKYKSKIMPKTLNPQWREQFDFHLYEERGGVIDITAWDKDAGKRDDFIGRCQVDLSALSREQTHKLELQLEEGEGHLVLLVTLTASATVSISDLSVNSLEDQKEREEILKRYSPLRIFHNLKDVGFLQ

SEQ ID NO: 1070 - protein, 136 aa, Homo sapiens
  SITE (83): Xaa equals any of the naturally occurring L-amino acids
MYSTQQGGLIVGIIRCVHLAAMDANGYSDPFVKLWLKPDMGKKAKHKTQIKKKTLNPEFNEEFFYDIKHSDLAKKSLDISVWXYDIGKSNDYIGGCQLGISAKGERLKHWYECLKNKDKKIERWHQLQNENHVSSD

SEQ ID NO: 1071 - protein, 208 aa, Homo sapiens
  SITE (40): Xaa equals any of the naturally occurring L-amino acids
  SITE (45): Xaa equals any of the naturally occurring L-amino acids
  SITE (46): Xaa equals any of the naturally occurring L-amino acids
  SITE (105): Xaa equals any of the naturally occurring L-amino acids
  SITE (177): Xaa equals any of the naturally occurring L-amino acids
  SITE (178): Xaa equals any of the naturally occurring L-amino acids
LWIGRHRGTLWPYQLRPGYLYGSDQLVVRILQALDLPAKXSNGFXXPYVKIYLLPDRKKKFQTKVHRKTLNPVFNETFQFSVPLAELAQRKLHFSVYDFNRFSRXDLIGQVVLDNLLELAEQPPDRPLWRDIVEGGSEKADLGELNFSLCYLPTAGRLTVTIIKASNLKAMDLTGFXXPYVKASLNQRGAASEEAENLHQEEHAEPHL

SEQ ID NO: 1072 - protein, 188 aa, Homo sapiens
  SITE (1): Xaa equals any of the naturally occurring L-amino acids
  SITE (2): Xaa equals any of the naturally occurring L-amino acids
  SITE (10): Xaa equals any of the naturally occurring L-amino acids
  SITE (24): Xaa equals any of the naturally occurring L-amino acids
XXVLSFDRFXRDDVIGEVMVPLAXVDPSTGKVQLTRDIIKRNIQKCISRGELQVSLSYQPVAQRMTVVVLKARHLPKMDITGLSGNPYVKVNVYYGRKRIAKKKTHVKKCTLNPIFNESFIYDIPTDLLPDISIEFLVIDFDRTTKNEVVGRLILGAHSVTASGAEHWREVCESPRKPVAKWHSLSEY

SEQ ID NO: 1073 - protein, 147 aa, Homo sapiens
  SITE (67): Xaa equals any of the naturally occurring L-amino acids
PDEAMEDGEEGSDDEAEWVVTKDKSKYDEIFYNLAPADGKLSGSKAKTWMVGTKLPNSVLGRIWKLXDVDRDGMLDDEEFALPAVRTGGLPPHYRQTPRWKHLEGTTGGTRLLCPPFTPPASRSLRHITHTLAHAGIHPSVIHSNIY

SEQ ID NO: 1074 - protein, 50 aa, Homo sapiens
EEERKAEEKQRETASVLVNYRALYPFEARNHDEMSFNSGDIIQVGNEFFF

SEQ ID NO: 1075 - protein, 305 aa, Homo sapiens
  SITE (181): Xaa equals any of the naturally occurring L-amino acids
PLTGRKCPGWTHSGSRRSPRIAEEVPGFPKRAEASRQFSETADRLELLRRAVMAAARATTPADGEEPAPEAEALAAARERSSRFLSGLELVKQGAEARVFRGRFQGRAAVIKHRFPKGYRHPALEARLGRRRTVQEARALLRCRRAGISAPVVFFVDYASNCLYMEEIEGSVTVRDYIQSXMETEKTPQGLSNLAKTIGQVLARMHDEDLIHGDLTTSNMLLKPPLEQLNIVLIDFGLSFISALPEDKGVDLYVLEKAFLSTHPNTETVFEAFLKSYSTSSKKARPVLKKLDEVRLRGRKRSMVG

SEQ ID NO: 1076 - protein, 144 aa, Homo sapiens
  SITE (11): Xaa equals any of the naturally occurring L-amino acids
  SITE (134): Xaa equals any of the naturally occurring L-amino acids
TLLANCVAPWXLNHMSRRLSQMLLMFLLATCLLAIIFVPQEMQTLRVVLATLGVGAASLGITCSTAQENELIPSIIRGRATGITGNFANIGGALASLMMILSIYSRPLPWIIYGVFAILSGLVVLLLPETRNQXLLDSIQDVGK

SEQ ID NO: 1077 - protein, 46 aa, Homo sapiens
  SITE (15): Xaa equals any of the naturally occurring L-amino acids
  SITE (17): Xaa equals any of the naturally occurring L-amino acids
  SITE (28): Xaa equals any of the naturally occurring L-amino acids
AITAKRSIRASSDVXRXLCGTTAIEWTXCRQVVEALGYGGADEHES

SEQ ID NO: 1078 - protein, 249 aa, Homo sapiens
  SITE (2): Xaa equals any of the naturally occurring L-amino acids
  SITE (5): Xaa equals any of the naturally occurring L-amino acids
  SITE (8): Xaa equals any of the naturally occurring L-amino acids
  SITE (13): Xaa equals any of the naturally occurring L-amino acids
  SITE (37): Xaa equals any of the naturally occurring L-amino acids
LXDLXLIXTTVPXMAFNYLSGSKSISMAGCATQIFFXTSLLGSECFLLAVMAYDRYTAICHPLRYTNLMSPKICGLMTAFSWILGSTDGIIYAVATFSFSYCGSREIAHFFCELPSLLILSCNDTSIFEKVIFICSIVMLVFPVAIIIASYAGVILAVIHMGSGEGRRKAFTTCSSHLMVVGMFYGAGLFMYIQPTSDRSPTQDKLVSVFYTILTPMLNPLIYSLRNKEVTRAFMKISGKGKSGERVTS

SEQ ID NO: 1079 - protein, 456 aa, Homo sapiens
  SITE (7): Xaa equals any of the naturally occurring L-amino acids
  SITE (220): Xaa equals any of the naturally occurring L-amino acids
  SITE (315): Xaa equals any of the naturally occurring L-amino acids
  SITE (316): Xaa equals any of the naturally occurring L-amino acids
  SITE (320): Xaa equals any of the naturally occurring L-amino acids
  SITE (321): Xaa equals any of the naturally occurring L-amino acids
  SITE (341): Xaa equals any of the naturally occurring L-amino acids
  SITE (371): Xaa equals any of the naturally occurring L-amino acids
NVWQWAXWGCGGVGAKRHGLDPRLESGRPPTAAASCPPCALGATMSGDKLLSELGYKLGRTIGEGSYSKVKVATSKKYKGTVAIKVVDRRRAPPDFVNKFLPRELSILRGVRHPHIVHVFEFIEVCNGKLYIVMEAAATDLLQAVQRNGRIPGVQARDLFAQIAGAVRYLHDHHLVHRDLKCENVLLSPDERRVKLTDFGFGRQAHGYPDLSTTYCGSAXYASPEVLLGIPYDPKKYDVWSMGVVLYVMVTGCMPFDDSDIAGLPRRQKRGVLYPEGLELSERCKALIAELLQFSPSAGPSAGQVARNCWLRAGXXRLEXXWFQPFLQPRALGQGGARARXALRGNMRSCRVLLHMRFFPSASLPFFPRGXPQLPLFGIHVPRDPGSWRRMRIRDSLRPGPERARPEGTEALRLRGTLSLCAEGVPSQPAVGARFPVGTCNKLAVPRKKKKKKKTR

SEQ ID NO: 1080 - protein, 170 aa, Homo sapiens
ADNNFTQETAMTMITPSSKLTLTKGNKSWSSTAVAAALELVDPPGCRNSARGNNVMLMPTGIIKLIDFGCARRLAWAGLNGTHSDMLKSMHGTPYWMAPEVINESGYGRKSDIWSIGCTVFEMATGKPPLASMDRMAAMFYIGAHRGLMPPLPDHFSENAADFVRMCLTR

SEQ ID NO: 1081 - protein, 500 aa, Homo sapiens
  SITE (280): Xaa equals any of the naturally occurring L-amino acids
AWFSLIMPFATVIFFVMILDFYVDSICSVKMEVSKCARYGSFPIFISALLFGNFWTHPITDQLRAMNKAAHQESTEHVLSGGVVVSAIFFILSANILSSPSKRGQKGTLIGYSPEGTPLYNFMGDAFQHSSQSIPRFIKESLKQILEESDSRQIFYFLCLNLLFTFVELFYGVLTNSLGLISDGFHMLFDCSALVMGLFAALMSRWKATRIFSYGYGRIEILSGFINGLFLIVIAFFVFMESVARLIDPPELDTHMLTPVSVGGLIVNLIGICAFSHAHXHAHGASQGSCHSSDHSHSHHMHGHSDHGHGHSHGSAGGGMNANMRGVFLHVLADTLGSIGVIVSTVLIEQFGWFIADPLCSLFIAILIFLSVVPLIKDACQVLLLRLPPEYEKELHIALEKIQKIEGLISYRDPHFWRHSASIVAGTIHIQVTSDVLEQRIVQQVTGILKDAGVNNLTIQVEKEAYFQHMSGLSTGFHDVLAMTKQMESMKYCKDGTYIM

SEQ ID NO: 1082 - protein, 384 aa, Homo sapiens
  SITE (297): Xaa equals any of the naturally occurring L-amino acids
NDLALRLARQFRGHQDVITLDHAYHGHLSSLIEISPYKFQKGKDVKKEFVHVAPTPDTYRGKYREDHADSASAYADEVKKIIEDAHNSGRKIAAFIAESMQSCGGQIIPPAGYFQKVAEYVHGAGGVFIADEVQVGFGRVGKHFWSFQMYGEDFVPDIVTMGKPMGNGHPVACVVTTKEIAEAFSSSGMEYFNTYGGNPVSCAVGLAVLDIIENEDLQGNAKRVGNYLTELLKKQKAKHTLIGDIRGIGLFIGIDLVKDHLKRTPATAEAQHIIYKMKEKRVLLSADGPHRNVLKIXPPMCFTEEDAKFMVDQLDRILTVLEEAMGTKTESVTSENTPCKTKMLKEAHIELLRDSTTDSKENPSRKRNGMCTDTHSLLSKRLKT

SEQ ID NO: 1083 - protein, 166 aa, Homo sapiens
HELGRATTALLLSFLGRRTIQAGSQAMAGLAILANMLVPQDLQTLRVVFAVLGKGCFGISLTCLTIYKAELFPTPVRMTADGILHTVGRLGAMMGPLILMSRQALPLLPPLLYGVISIASSLVVLFFLPETQGLPLPDTIQDLESQKSTAAQGNRQEAVTVESTSL

SEQ ID NO: 1084 - protein, 119 aa, Homo sapiens
  SITE (114): Xaa equals any of the naturally occurring L-amino acids
  SITE (115): Xaa equals any of the naturally occurring L-amino acids
DPRVRPNATKSSYNPGDVVYFVCRPGYKPVVPSLPMFSVCQDNNMWTPLQEACTAKQCQHPREPINGQIVAVNGSFSYGSQIHYSCNEGYRLVGKRILYCELSTNDEKKWTGVXXPPPV

SEQ ID NO: 1085 - protein, 179 aa, Homo sapiens
GRVGSSNGYVNISELQTSFPVGTVISYRCFPGFKLDGSAYLECLQNLIWSSSPPRCLALEVCPLPPMVSHGDFVCHPRPCERYNHGTVVEFYCDPGYSLTSDYKYITCQYGEWFPSYQVYCIKSEQTWPSTHETLLTTWKIVAFTATSVLLVLLSSSWQDVPDKLRPLSPRGLPDSAVT

SEQ ID NO: 1086 - protein, 254 aa, Homo sapiens
  SITE (112): Xaa equals any of the naturally occurring L-amino acids
YTKAEKFKSFQHSRLYQQFNENNSIGETQARKLSKLRVHEFIFHTRKFITRIYPKATRADSSNFNPQEFWNIGCQMVALNFQTPGLPMDLQNGKFLDNGGSGYILKPHFLRXSKSYFNPSNIKEGMPITLTIRLISGIQLPLTHSSSNKGDSLVIIEVFGVPNDQMKQQTRVIKKNAFSPRWNETFTFIIHVPELALIRFVVEGQGLIAGNEFLGQYTLPLLCMNKGYRRIPLFSRMGESLEPASLFVYVWYVR

SEQ ID NO: 1087 - protein, 205 aa, Homo sapiens
  SITE (161): Xaa equals any of the naturally occurring L-amino acids
  SITE (172): Xaa equals any of the naturally occurring L-amino acids
  SITE (195): Xaa equals any of the naturally occurring L-amino acids
AGLKGARGKMISAGLPGEMGSPGEPGPPGRKGVKGAKGLASFSTCELIQYVRDRSPGRHGKPECPVHPTELVFALDHSRDVTEQEFERMKEMMAFLVRDIKVRENSCPVGAHIAILSYNSHARHLVRFSDAYKKSQLLREIETIPYERSSASREIGRAMRXISRNVFKRTLXGAHTRKIATFFSSGQVRGCPLHXHGLPWKFGAA

SEQ ID NO: 1088 - protein, 81 aa, Homo sapiens
AFAIKFTLIDSQAQYPVVNTNYGKIQGLRTPLPSEILGPVEQYLGVPYASPPTGERRFQPPESPSSWTGIRNATQFSAVCP

SEQ ID NO: 1089 - protein, 154 aa, Homo sapiens
PERRSPGPAPRAPRLVGRGDCDPLLSVCLTTMPLYEGLGSGGEKTAVVIDLGEAFTKCGFAGETGPRCIIPSVIKRAGMPKPVRVVQYNINTEELYSYLKEFIHILYFRHLLVNPRDRRVVIIESVLCPSHFRETLTRVLFKYFEVPSVFISNK

SEQ ID NO: 1090 - protein, 108 aa, Homo sapiens
  SITE (76): Xaa equals any of the naturally occurring L-amino acids
  SITE (106): Xaa equals any of the naturally occurring L-amino acids
ARANPAMAYANEVKRVVSSAQEKGRKIAAFFAESLPSVGGQIIPPAGYFSQVAEHIRKAGGVFVADEIQVGFGRVXKHFWAFQLQGKDFVPDIVTMGKSIGNGHPXAC

SEQ ID NO: 1091 - protein, 187 aa, Homo sapiens
  SITE (18): Xaa equals any of the naturally occurring L-amino acids
  SITE (44): Xaa equals any of the naturally occurring L-amino acids
MTLIWRHLLRPLCLVTSXPRILEMHPFLSLGTSRTSVTKLSLHXKPRMPPCDFMPERYQSLGYNRVLEIHKEHLSPVVTAYFQKPLLLHQGHMEWLFDAEGNRYLDFFSGIVTVSVGHCHPKVNAVAQKQLGRLWHTSTIFFHPPMHEYAEKLAALLPEPLKVIFLVNSGSEANELAMLMAGRTQTT

SEQ ID NO: 1092 - protein, 287 aa, Homo sapiens
  SITE (146): Xaa equals any of the naturally occurring L-amino acids
  SITE (180): Xaa equals any of the naturally occurring L-amino acids
  SITE (247): Xaa equals any of the naturally occurring L-amino acids
  SITE (252): Xaa equals any of the naturally occurring L-amino acids
HDFPAEQVDDLNLTSGEIVYLLEKIDTDWYRGNCRNQIGIFPANYVKVIIDIPEGGNGKRECVSSHCVKGSRCVARFEYIGEQKDELSFSEGEIIILKEYVNEEWARGEVRGRTGIFPLNFVEPVEDYPTSGANVLSTKVPLKTKXEDSGSNSQVNSLPAEWCEALHSFTAETSDDLSFXRGDRIQILERLDSDWCRGRLQDREGIFPAVFVRPCPAEAKSMLAIVPKGRKAKALYDFRGENEDELXFKAGXIITELESVDDDWMSGELMGKSGIFPKNYIQFLQIS

SEQ ID NO: 1093 - protein, 138 aa, Homo sapiens
FIILDTDEYVLKYMESNAAQYSPEALASIQNHVRKREAPAPEAESKQTEKDPGVQELEALIDTIQKQLKDHSCKDNIREAFQIYDKEASGYVDRDMFFKICESLNVPVDDSLVKELIRMCSHGEGKINYYNFVRAFSN

SEQ ID NO: 1094 - protein, 309 aa, Homo sapiens
  SITE (192): Xaa equals any of the naturally occurring L-amino acids
  SITE (288): Xaa equals any of the naturally occurring L-amino acids
  SITE (298): Xaa equals any of the naturally occurring L-amino acids
  SITE (304): Xaa equals any of the naturally occurring L-amino acids
  SITE (309): Xaa equals any of the naturally occurring L-amino acids
VTTLDSSKVLRFYAIWDDTDSMYGECRTYIIHYYLMDDTVEIREVHERNDGRDPFPLLMNRQRVPKVLVENAKNFPQCVLEISDQEVLEWYTAKDFIVGKSLTILGRTFFIYDCDPFTRRYYKEKFGITDLPRIDVSKREPPPVKQELPPYNGFGLVEDSAQNCFALIPKAPKKDVIKMLVNDNKVLRYLAXLESPIPEDKDRRFVFSYFLATDTISIFEPPVRNSGYHWGQVPWAGLKLLNHTLQWDNPVLLWAPVTSFIGCLLIEVFWVTRFINPGLQTSMVLEIXGEPRCPSISXGRHSGXISGTX

SEQ ID NO: 1095 - protein, 117 aa, Homo sapiens
RDQGKALFLPHLSCTHFLPSTPHSKQTEKDPGVQELEALIDTIQKQLKDHSCKDNIREAFQIYDKEASGYVDRDMFFKICESLNVPVDDSLVKELIRMCSHGEGKINYYNFVRAFSN

SEQ ID NO: 1096 - protein, 163 aa, Homo sapiens
  SITE (75): Xaa equals any of the naturally occurring L-amino acids
GPVGSSSEAPRGAGDAGMAGELTPEEEAQYKKAFSAVDTDGNGTINAQELGAALKATGKNLSEAQLRKLISEVDXDGDGEISFQEFLTAAKKARAGLEDLQVAFRAFDQDGDGHITVDELRRAMAGLGQPLPQEELDAMIREADVDQDGRVNYEEFARMLAQE

SEQ ID NO: 1097 - protein, 341 aa, Homo sapiens
  SITE (306): Xaa equals any of the naturally occurring L-amino acids
  SITE (338): Xaa equals any of the naturally occurring L-amino acids
KMAAAAGSCARVAAWGGKLRRGLAVSRQAVRSPGPLAAAVAGAALAGAGAAWHHSRVSVAARDGSFTVSAQKNVEHGIIYIGKPSLRKQRFMQFSSLEHEGEYYMTPRDFLFSVMFEQMERKTSVKKLTKKDIEDTLSGIQTAGCGSTFFRDLGDKGLISYTEYLFLLTILTKPHSGFHVAFKMLDTDGNEMIEKREFFKLQKIISKQDDLMTVKTNETGYQEAIVKEPEINTTLQMRFFGKRGQRKLHYKEFRRFMENLQTEIQEMEFLQFSKGLSFMRKEDFAEWLLFFTNTENKGIYWEKCEXGSCQQGRALVWGGFQSFCPFTTRWETLLLPCXCSV

SEQ ID NO: 1098 - protein, 290 aa, Homo sapiens
KLWVFTSFMAYGSAKDLICTHFMDGMNELAIAYILQGVLKALDYIHHMGYVHRSVKASHILISVDGKVYLSGLRSNLSMISHGQRQRVVHDFPKYSVKVLPWLSPEVLQQNLQGYDAKSDIYSVGITACELANGHVPFKDMPATQMLLEKLNGTVPCLLDTSTIPAEELTMSPSRSVANSGLSDSLTTSTPRPSNGDSPSHPYHRTFSPHFHHFVEQCLQRNPDARPSASTLLNHSFFKQIKRRASEALPELLRPVTPITNFEGSQSQDHSGIFGLVTNLEELEVDDWEF

SEQ ID NO: 1099 - protein, 409 aa, Homo sapiens
  SITE (11): Xaa equals any of the naturally occurring L-amino acids
  SITE (21): Xaa equals any of the naturally occurring L-amino acids
  SITE (27): Xaa equals any of the naturally occurring L-amino acids
APQALHFMLPXRMLCGIVADXNFTQEXAMTMITPSSKLTLTKGNKSWSSTAVAAALELVDPPGCRNSARARAARPRYSLLAEIGRGSYGVVYEAVAGRSGARVAVKKIRCDAPENVELALAEFWALTSLKRRHQNVVQFEECVLQRNGLAQRMSHGNKSSQLYLRLVETSLKGERILGYAEEPCYLWFVMEFCEGGDLNQYVLSRRPDPATNKSFMLQLTSAIAFLHKNHIVHRDLKPDNILITERSGTPILKVADFGLSKVCAGLAPRGKEGNQDNKNVNVNKYWLSSACGSDFYMAPEVWEGHYTAKADIFALGIIIWAMIERITFIDSETKKELLGTYIKQGTEIVPVGEALLENPKMELHIPQKRRTSMSEGIKQLLKDMLAANPQDRPDAFELETRMDQVTCAA

SEQ ID NO: 1100 - protein, 212 aa, Homo sapiens
  SITE (9): Xaa equals any of the naturally occurring L-amino acids
  SITE (166): Xaa equals any of the naturally occurring L-amino acids
  SITE (175): Xaa equals any of the naturally occurring L-amino acids
  SITE (190): Xaa equals any of the naturally occurring L-amino acids
  SITE (193): Xaa equals any of the naturally occurring L-amino acids
  SITE (205): Xaa equals any of the naturally occurring L-amino acids
  SITE (210): Xaa equals any of the naturally occurring L-amino acids
  SITE (212): Xaa equals any of the naturally occurring L-amino acids
GRSHEPFGXNCQCLHPEATRIDKLYKVENKPALSSNEQLCFLVRPRIKNMRYIASLVNADKLAGRTRKYKVIFSPQKFYACEMVLEEEGIYGDVSCDEWAFSLLPLDVDLLSMELPEFFRDYFLEGDQRWINTVAQALHLLSTLYGPFPNCYGIGRCAKMAYELWXEPGRRRRMXETKGPTEGFGHIFLXGQXMWDLWTAFCSQXFFEGXVX

SEQ ID NO: 1101 - protein, 93 aa, Homo sapiens
  SITE (32): Xaa equals any of the naturally occurring L-amino acids
  SITE (42): Xaa equals any of the naturally occurring L-amino acids
  SITE (46): Xaa equals any of the naturally occurring L-amino acids
  SITE (49): Xaa equals any of the naturally occurring L-amino acids
  SITE (51): Xaa equals any of the naturally occurring L-amino acids
  SITE (74): Xaa equals any of the naturally occurring L-amino acids
GNFSFGYALVYTSPVIPALERSLDPDLHLTKXQASWFGSVFXLGAXAGXLXAMILNDLLGRKLSIMFSAVPSAXGYALMAGAHGLWMLLLGRT

SEQ ID NO: 1102 - protein, 440 aa, Homo sapiens
APRAPGLVGRGDCDPLLSVCLTTMPLYEGLGSGGEKTAVVIDLGEAFTKCGFAGETGPRCIIPSVIKRAGMPKPVRVVQYNINTEELYSYLKEFIHILYFRHLLVNPRDRRVVIIESVLCPSHFRETLTRVLFKYFEVPSVLLAPSHLMALLTLGINSAMVLDCGYRESLVLPIYEGIPVLNCWGALPLGGKALHKELETQLLEQCTVDTSVAKEQSLPSVMGSVPEGVLEDIKARTCFVSDLKRGLKIQAAKFNIDGNNERPSPPPNVDYPLDGEKILHILGSIRDSVVEILFEQDNEEQSVATLILDSLIQCPIDTRKQLAENLVVIGGTSMLPGFLHRLLAEIRYLVEKPKYKKALGTKTFRIHTPPAKANCVAWLGGAIFGALQDILGSRSVSKEYYNQTGRIPDWCSLNNPPLEMMFDVGKTQPPLMKRAFSTEK

SEQ ID NO: 1103 - protein, 194 aa, Homo sapiens
RPPRMGKSNSKLKPEVVEELTRKTYFTEKEVQQWYKGFIKDCPSGQLDAAGFQKIYKQFFPFGDPTKFATFVFNVFDENKDGRIEFSEFIQALSVTSRGTLDEKLRWAFKLYDLDNDGYITRNEMLDIVDAIYQMVGNTVELPEEENTPEKRVDRIFAMMDKNADGKLTLQEFQEGSKADPSIVQALSLYDGLV

SEQ ID NO: 1104 - protein, 115 aa, Homo sapiens
TLIRNILFGAVRGLNYLHQNGCIHRSIKASHILISGDGLVTLSGLSHLHSLVKHGQRHRAVYDFPQFSTSVQPWLSPELLRQDLHGYNVKSDIYSVGITACGIKPVGRCLFQDMH

SEQ ID NO: 1105 - protein, 140 aa, Homo sapiens
  SITE (127): Xaa equals any of the naturally occurring L-amino acids
ATRRSNKKLPFNRSSSDMDLQKKQSNLATGLSKAKSQVFKNQDPVLPPRPKPGHPLYSKYMLSVPHGIANEDIVSQNPGELSCKRGDVLVMLKQTENNYLECQKGEDTGRVHLSQMKIITPLDEHLXKQTKRSKPRSEAC

SEQ ID NO: 1106 - protein, 267 aa, Homo sapiens
  SITE (6): Xaa equals any of the naturally occurring L-amino acids
GTPCKXTGVRNSRVDPRVRGTQRVLLDNVLSEEQCRELHSVASGIMLVGDGYRGKTSPHTPNEKFEGATVLKALKSGYEGRVPLKSARLFYDISEKARRIVESYFMLNSTLYFSYTHMVCRTALSGQQDRRNDLSHPIHADNCLLDPEANECWKEPPAYTFRDYSALLYMNDDFEGGEFIFTEMDAKTVTASIKPKCGRMISFSSGGENPHGVKAVTKGKRCAVALWFTLDPLYRELERIQADEVIAILDQEQQGKHELNINPKDEL

SEQ ID NO: 1107 - protein, 151 aa, Homo sapiens
  SITE (136): Xaa equals any of the naturally occurring L-amino acids
  SITE (145): Xaa equals any of the naturally occurring L-amino acids
  SITE (149): Xaa equals any of the naturally occurring L-amino acids
EARRPCTLHLRSALHPATMCELYSKRDTLGLRKKHIGPSCKVFFASDPIKIVRAQRQYMFDENGEQYLDCINNVAHVGHCHPGVVKAALKQMELLNTNSRFLHDNIVEYAKRLSATLPEKLSVCYFTNSGSEANDXPYAGSAFQXPLGXDQ

SEQ ID NO: 1108 - protein, 287 aa, Homo sapiens; identical to SEQ ID NO: 817

SEQ ID NO: 1109 - protein, 273 aa, Homo sapiens; identical to SEQ ID NO: 818

SEQ ID NO: 1110 - protein, 125 aa, Homo sapiens
  SITE (27): Xaa equals any of the naturally occurring L-amino acids
GPVKLRLTVLCAKNLVKKDFFRLPDPXAKVVVDGSGQCHSTDTVKNTLDPKWNQHYDLYIGKSDSVTISVWNHKKIHKKQGAGFLGCVRLLSNAINRLKDTGYQRLDLCKLGPNDNDTVRGQIVV

SEQ ID NO: 1111 - protein, 93 aa, Homo sapiens
YQKAEPALLAIMRKGVLKDPEIADLFYKDDPEELFIGLHEIGHGSFGAVYFATNAHTNEVVAIKKMSYSGKQTHEKWQDILKEVKFLRQLKAS

SEQ ID NO: 1112 - protein, 603 aa, Homo sapiens
  SITE (163): Xaa equals any of the naturally occurring L-amino acids
QPSRLPADRVLFDYQPEAPDELALRRGDVVKVLSKTTEDKGWWEGECQGRRGVFPDNFVLPPPPIKKLVPRKVVSRESAPIKEPKKLMPKTSLPTVKKLATATTGPSKAKTSRTPSRDSQKLTSRDSGPNGGFQSGGSYHPGRKRSKTQTPQQRSVSSQEEEXSSPVKAPSVKRTPMPDKTATPERPPAPENAPSSKKIPAPDKVPSPEKTLTLGDKASIPGNSTSGKIPAPDKVPTPEKMVTPEDKASIPENSIIPEETLTVDKPSTPERVFSVEESPALEAPPMDKVPNPKMAPLGDEAPTLEKVLTPELSEEEVSTRDDIQFHHFSSEEALQKVKYFVAKEDPSSQEEAHTPEAPPPQPPSSERCLGEMKCTLVRGDSSPRQAELKSGPASRPALEKPHPHEEATTLPEEAPSNDERTPEEEAPPNEQRPLREEVLPKEGVASKEEVTLKEELPPKEEVAPKEEVPPIERAFAQKTRPIKPPPDSQETLALPSLVPQNYTENKNEGVDVTSLRGEVESLRRALELMEEEADRHLGGAEEREGAAPAAGGPGDAGDPEVPDPARHPHADADLLRVGLGRDRGLTWLGPPTSLHTTLGNARK

SEQ ID NO: 1113 - protein, 65 aa, Homo sapiens
PPVKNQQGQDIDDNWVKDRKKEFEELIDSNHDGIVTAEELESYMDPMNEYNALNEISLQSLCRRR

SEQ ID NO: 1114 - protein, 169 aa, Homo sapiens
  SITE (63): Xaa equals any of the naturally occurring L-amino acids
  SITE (160): Xaa equals any of the naturally occurring L-amino acids
  SITE (163): Xaa equals any of the naturally occurring L-amino acids
MLGEGQVLRSPTNRLLLHFQSPRVPRGGGFRIHYQAYLLSCGFPPRPAHGDVSVTDLHPGGTXTFHCDSGYQLQGEETLICLNGTRPSWNGETPSCMASCGGTIHNATLGRIVSPEPGGAVGPNLTCRWVIEAAEGRRLHLHFERVSLDEDNDRLMVRSXGKXPIPRDL

SEQ ID NO: 1115 - protein, 167 aa, Homo sapiens
  SITE (134): Xaa equals any of the naturally occurring L-amino acids
  SITE (135): Xaa equals any of the naturally occurring L-amino acids
  SITE (136): Xaa equals any of the naturally occurring L-amino acids
  SITE (138): Xaa equals any of the naturally occurring L-amino acids
  SITE (162): Xaa equals any of the naturally occurring L-amino acids
  SITE (164): Xaa equals any of the naturally occurring L-amino acids
LHRDLKTQNILLDKHRMVVKIGDFGISKILSSKSKAYTVVGTPCYISPELCEGKPYNQKSDIWALGCVLYELASLKRAFEAANLPALVLKIMSGTFAPISDRYSPELRQLVLSLLSLEPASGTTQPHHGTSPLXXXLXNFTPTWAVSRMRRAEKSVGPSNTXSXTTN

SEQ ID NO: 1116 - protein, 267 aa, Homo sapiens
  SITE (248): Xaa equals any of the naturally occurring L-amino acids
  SITE (262): Xaa equals any of the naturally occurring L-amino acids
  SITE (263): Xaa equals any of the naturally occurring L-amino acids
  SITE (264): Xaa equals any of the naturally occurring L-amino acids
ARGEVRYVKEPYIQSRFYRAPEILLGLPFCEKVDVWSLGCVMAELHLGWPLYPGNNEYDQVRYICETQGLPKPHLLHAACKAHHFFKRNPHPDAANPWQLKSSADYLAETKVRPLERRKYMLKSLDQIETVNGGSVASRLTFPDREALAEHADLKSMVELIKRMLTWESHERISPSAALRHPFVSMQQLRSAHETTHYYQLSLRSYRLSLQVEGKPPTPVVAAEDGTPYYCLAEEKEAAGMGSVAGSXPFFREEKAPGMQRXXXPAG

SEQ ID NO: 1117 - protein, 144 aa, Homo sapiens
VLPWGLNESQRVVRMVGGCLGGSKSSHSAWEGPILPKCKSSRGVTELANRLVCLVFFLHVDIILLILLPGPPQGYRKVKSSPEPIMSSLLTEGTAGYVVPPGLVLAAGGRCLRVPTVPFCFSECIKGTRTCQWEIHPSGTGREG

SEQ ID NO: 1118 - protein, 51 aa, Homo sapiens
LQEFGTSSHTLEERVVHWYFKLLDKNSSGDIGKKEIKPFKSSFAINQSPKN

SEQ ID NO: 1119 - protein, 70 aa, Homo sapiens
VAAETADGKYAQKLFNDLFEDYSNALRPVEDTDKVLNVTLQITLSQIKDMDPIQNTTLYLAKIYFSGKNL

SEQ ID NO: 1120 - protein, 135 aa, Homo sapiens
  SITE (28): Xaa equals any of the naturally occurring L-amino acids
  SITE (35): Xaa equals any of the naturally occurring L-amino acids
  SITE (48): Xaa equals any of the naturally occurring L-amino acids
  SITE (58): Xaa equals any of the naturally occurring L-amino acids
  SITE (104): Xaa equals any of the naturally occurring L-amino acids
  SITE (106): Xaa equals any of the naturally occurring L-amino acids
  SITE (115): Xaa equals any of the naturally occurring L-amino acids
  SITE (129): Xaa equals any of the naturally occurring L-amino acids
  SITE (134): Xaa equals any of the naturally occurring L-amino acids
KILIHDTTMENIMLRVHPDGNVLLSLRXTVSAMCXMDFSRFPLDTQNXSLELESYAYXEDDLMLYWKHGNKSLNTEEHMSLSQFFIEDFSASSGLAFYSSTGWXNXLFINFGLKXAWFLLWAANLFSQXLIGWXR

SEQ ID NO: 1121 - protein, 170 aa, Homo sapiens; identical to SEQ ID NO: 831
  SITE (118): Xaa equals any of the naturally occurring L-amino acids

SEQ ID NO: 1122 - protein, 546 aa, Homo sapiens
  SITE (515): Xaa equals any of the naturally occurring L-amino acids
QIALNIAQMITEFVFIPIFAIAAGVAQSLQYLNRYHVIREPPEHILNRLPSSASALACSAHALNLIEKRTLDHEEMKALNREVIEYFKEHVNPGFLEYRKSVTAGGDYGAVEWQAGSLNTLVDTQGQEFIDCLGGFGIFNVGHRNPVVVSAVQNQLATMSSVGGEPWGFSKTCFLLLIRCRLVNLNLFNLVYKSIMTTDDLAFDQRHIWHPYTSMTSPLPVYPVVSAEGCELILSDGRRLVDGMSSWWAAIHGYNHPQLNAAMKSQIDAMSHVMFGGITHAPAIELCRKLVAMTPQPLECVFLADSGSVAVEVAMKMALQYWQAKGEARQRFLTFRNGYHGDTFGAMSVCDPDNSMHSLWKGYLPENLFAPAPQSRMDGEWDERDMVGFARLMAAHRHEIAAVIIEPIVQGAGGMRMYHPEWLKRIRKICDREGILLIADEIATGFGRTGKLFACEHAEIAPDILCLGKALTGGTMTLSATLTTREVAETISNGEAGCFMHGPTFMGNPLACAAXNASLAILESGDWQQQVADIEVQLREQLCPRP

SEQ ID NO: 1123 - protein, 90 aa, Homo sapiens
  SITE (20): Xaa equals any of the naturally occurring L-amino acids
KQWPRGRLEFQTDHSTGKRXFNITFTTFRHNECPDPGVPVNGKRFGDSLQLGSSISFLCDEGFLGTQGSETINCVLKEGSVVLEQRCAAV

SEQ ID NO: 1124 - protein, 138 aa, Homo sapiens
  SITE (128): Xaa equals any of the naturally occurring L-amino acids
ANLLANDVDFHSFPFVAFGKGIIKKCRTSPDAFVQLALQLAHYKDMGKFCLTYEASMTRLFREGRTETVRSCTTESCDFVRAMVDPAQTVEQRLKLFKLASEKHQHMYRLAMTGSGIDRHLFCLYVVXKYLAVGVPFP

SEQ ID NO: 1125 - protein, 194 aa, Homo sapiens
  SITE (179): Xaa equals any of the naturally occurring L-amino acids
HRLLQAPQGHGGIARPRGLGICFSNWLEISLETTYSDTFRRRRWRRKMAPSETHGAAAIFKLEGALGADTTEDGDEKSLEKQKHSATTVFGANTPIVSCNFDRVYIYHLRCYVYQARNLLALDKDSFSDPYAHICFLHRSKTTEIIHSTLNPTWDQTIIFDEVEIYGEPKQFYRIHPKXSWNFLTMTKWAKMNF

SEQ ID NO: 1126 - protein, 140 aa, Homo sapiens
  SITE (14): Xaa equals any of the naturally occurring L-amino acids
  SITE (72): Xaa equals any of the naturally occurring L-amino acids
  SITE (73): Xaa equals any of the naturally occurring L-amino acids
  SITE (97): Xaa equals any of the naturally occurring L-amino acids
  SITE (98): Xaa equals any of the naturally occurring L-amino acids
  SITE (128): Xaa equals any of the naturally occurring L-amino acids
ILAHFRDRGQFCLXYESAMTRLFLEDRTETVRSCRREACNFVRAMEDKEKTDPQCLALFRVAVDKHQALLKXXMSGQGVDRHLFALYIVSRFLHLQXXFLTQVHSEQWQLSTSQIPVQQMHLFDVHNXPDYVSSGGGFGP

SEQ ID NO: 1127 - protein, 126 aa, Homo sapiens
  SITE (68): Xaa equals any of the naturally occurring L-amino acids
  SITE (74): Xaa equals any of the naturally occurring L-amino acids
  SITE (97): Xaa equals any of the naturally occurring L-amino acids
PGGSEANSGPKPYPRLPAWEKGEPERRGRSATGRAKEPLSRATETGEARGQDGSGRRGPQKRGVRVLXPSTAEXVPARSPSETLAYQHLPVRIFVAXFDYDPVSMSPNPDAGEEELPFREGQILKV

SEQ ID NO: 1128 - protein, 114 aa, Homo sapiens
  SITE (106): Xaa equals any of the naturally occurring L-amino acids
  SITE (113): Xaa equals any of the naturally occurring L-amino acids
SIQEGKYEFPDKDWAHISCAAKDLISKLLVRDAKQRLSAAQVLQHPWVQGCAPENTLPTPMVLQRNSCAKDLTSFAAEAIAMNRQLAQHDEDLAEKKKKKKKKKKXKKKKKKXK

SEQ ID NO: 1129 - protein, 148 aa, Homo sapiens
DPAGITRGLPDPAKMQSTSNHLWLLSDILGQGATANVFRGRHKKTGDLFAIKVFNNISFLRPVDVQMREFEVLKKLNHKNIVKLFAIEEETTTRHKVLIMEFCPCGSLYTVLEEPSNAYGLPESEFLIVLRDVVGGMNHLRENGNSAP

SEQ ID NO: 1130 - protein, 173 aa, Homo sapiens
  SITE (137): Xaa equals any of the naturally occurring L-amino acids
  SITE (168): Xaa equals any of the naturally occurring L-amino acids
LEEYQALTFLTRNEILCIHDTFLKLCPPGKYYKEATLTMDQVSSLPALRVNPFRDRICRVFSHKGMFSFEDVLGMASVFSEQACPSLKIEYAFRIYDFNENGFIDEEDLQRIILRLLNSDDMSEDLLMDLTNHVLSXSDLDNDNMLSFSEFEHAMAKSPDFMTPFGFXSGDLM

SEQ ID NO: 1131 - protein, 128 aa, Homo sapiens
  SITE (102): Xaa equals any of the naturally occurring L-amino acids
  SITE (103): Xaa equals any of the naturally occurring L-amino acids
  SITE (104): Xaa equals any of the naturally occurring L-amino acids
  SITE (108): Xaa equals any of the naturally occurring L-amino acids
  SITE (109): Xaa equals any of the naturally occurring L-amino acids
STESADDYNFVRAYECFQHKNHTCLVFEMLEQNLYDFLKQNKFSPLPLKYIRPVLQQVATALMKLKSLGLIHADLKPENIMLVDPSRQPYRVKVIDFGSASXXXKAVXXTYLQSRYYRALRSSWFTIL

SEQ ID NO: 1132 - protein, 104 aa, Homo sapiens
  SITE (50): Xaa equals any of the naturally occurring L-amino acids
  SITE (52): Xaa equals any of the naturally occurring L-amino acids
  SITE (77): Xaa equals any of the naturally occurring L-amino acids
QPLVSSHLGIRLTSKMPQLLQNINGIIEAFRRYARTEGNCTALTRGELKXLXEQEFADVIVNPTIQQLWMRSCVCWXKTTQGLWEFKEFLVLVFKVCPGLFSRH

SEQ ID NO: 1133 - protein, 189 aa, Homo sapiens
QSPAPLSDPLSRGRCQMSTMGNEASYPAEMCSHFDNDEIKRLGRRFKKLDLDKSGSLSVEEFMSLPELRHNPLVRRVIDVFDTDGDGEVDFKEFILGTSQFSVKGDEEQKLRFAFSIYDMDKDGYISNGELFQVLKMMVGNNLTDWQLQQLVDKTIIILDKDGDGKISFEEFSAVVRDLEIHKKLVLIV

SEQ ID NO: 1134 - protein, 109 aa, Homo sapiens
  SITE (23): Xaa equals any of the naturally occurring L-amino acids
  SITE (31): Xaa equals any of the naturally occurring L-amino acids
  SITE (77): Xaa equals any of the naturally occurring L-amino acids
  SITE (79): Xaa equals any of the naturally occurring L-amino acids
FAFFAVEMVVKMVALGIFGKKCXLGDTWNRXDFFIVIAGMLEYSLDLQNVSFSAVRTVRVLRPLRAINRVPSMRILXTXLLDTLPCWATSCCSASSSSSSSASSASSCG

SEQ ID NO: 1135 - protein, 262 aa, Homo sapiens
  SITE (203): Xaa equals any of the naturally occurring L-amino acids
  SITE (211): Xaa equals any of the naturally occurring L-amino acids
CGQQADVSPPIPHLRALLSSSDDPPAEVDIFELLKVSYEKFSSLRAEDIEQMRFKQRLKVIQSLEDTAKRSVVRAIPVDIGFSIEELEDLYMVFKAKHLASQYWGCSRTMAGRRDPSLPYLEQYRIDASQFRELFASLTPWACGSHTPLLAGRMFRLLDENKDSLINFKEFVTGMSGMYHGDLTEKLKVLYKLHLPPALSPEXSRVSPGGXPLFHRGQLLQKKHLPQEEQEGSGSEERGEEKGTSSPDYRHYLRLWAQGERG

SEQ ID NO: 1136 - protein, 206 aa, Homo sapiens
  SITE (30): Xaa equals any of the naturally occurring L-amino acids
  SITE (33): Xaa equals any of the naturally occurring L-amino acids
  SITE (100): Xaa equals any of the naturally occurring L-amino acids
SSSRTPSGSADPTLLRPLSISPCSTDKPAXRRXHPLPTDLPSRGLLALSLKYVPAGSEGAGLPPSGELHFWVKEARDLLPLRAGSLDTYVQCFVLPDDSXASRQRTRVVRRSLSPVFNHTMVYDGFGPADLRQACAELSLWDHGALANRQLGGTRLSLGTGSSYGLQVPWMDSTPEEKQLWQALLEQPCEWVDGLLPLRTNLAPRT

SEQ ID NO: 1137 - protein, 399 aa, Homo sapiens
  SITE (22): Xaa equals any of the naturally occurring L-amino acids
  SITE (33): Xaa equals any of the naturally occurring L-amino acids
  SITE (369): Xaa equals any of the naturally occurring L-amino acids
ELLESQFSKTFIIDYYFEVVQXLKFGVYDIDNXTIELSDDDFLGECECTLGQIVSSKKLTRPLVMKTGRPAGKGSITISAEEIKDNRVVLFEMEARKLDNKDLFGKSDPYLEFHKQTSDGNWLMVHRTEVVKNNLNPVWRPFKISLNSLCYGDMDKTIKVECYDYDNDGSHDLIGTFQTTMTKLKEASRSSPVEFECINEKKRQKKKSYKNSGVISVKQCEITVECTFLDYIMGGCQLNFTVGVDFTGSNGDPRSPDSLHYISPNGVNEYLTALWSVGLVIQDYDADKMFPAFGFGAQIPPQWQVSHEFPMNFNPSNPYCNGIQGIVEAYRSCLPQIKLYGPTNFSPIINHVARFAAAATQQQTASQYXVLLIITDGVITDLDETRQAIVNASSCLCPS

SEQ ID NO: 1138 - protein, 207 aa, Homo sapiens
  SITE (194): Xaa equals any of the naturally occurring L-amino acids
WLLRPFRLQLGHGVAHSHAAVIPDGDSIRRETGFSQASLLRLHHRFRALDRNKKGYLSRMDLQQIGALAVNPLGDRIIESFFPDGSQRVDFPGFVRVLAHFRPVEDEDTETQDPKKPEPLNSRRNKLHYAFQLYDLDRDGKISRHEMLQVLRLMVGVQVTEEQLENIADRTVQEADEDGDGAVSFVEFTKSLEXMDVEQKMSIRILK

SEQ ID NO: 1139 - protein, 268 aa, Homo sapiens
MYVFKGDEVIEYDGEFSADTIVEFLLDVLEDPVELIEGERELQAFENIEDEIKLIGYFKSKDSEHYKAFEDAAEEFHPYIPFFATFDSKVAKKLTLKLNEIDFYEAFMEEPVTIPDKPNSEEEIVNFVEEHRRSTLRKLKPESMYETWEDDMDGIHIVAFAEEADPDGFEFLETLKAVAQDNTENPDLSIIWIDPDDFPLLVPYWEKTFDIDLSAPQIGVVNVTDADSVWMEMDDEEDLPSAEELEDWLEDVLEGEINTEDDDDDDDD

SEQ ID NO: 1140 - protein, 721 aa, Homo sapiens
  SITE (123): Xaa equals any of the naturally occurring L-amino acids
APLIPATSNRESVKSEDGDDEEPPYRGPFCGRARVHTDFTPSPYDTDSLKLKKGDIIDIISKPPMGTWMGLLNNKVGTFKFIYVDVLSEDEEKPKRPTRRRRKGRPPQPKSVEDLLDRINLKXHMPTFLFNGYEDLDTFKLLEEEDLDELNIRDPEHRAVLLTAVELLQEYDSNSDQSGSQEKLLVDSQGLSGCSPRDSGCYESSENLENGKTRKASLLSAKSSTEPSLKSFSRNQLGNYPTLPLMKSGDALKQGQEEGRLGGGLAPDTSKSCDPPGVTGLNKNRRSLPVSICRSCETLEGPQTVDTWPRSHSLDDLQVEPGAEQDVPTEVTEPPPQIVPEVPQKTTASSTKAQPLEQDSAVDNALLLTQSKRFSEPQKLTTKKLEGSIAASGRGLSPPQCLPRNYDAQPPGAKHGLARTPLEGHRKGHEFEGTHHPLGTKEGVDAEQRMQPKIPSQPPPVPAKKSRERLANGLHPVPMGPSGALPSPDAPCLPVKRGSPASPTSPSDCPPALAPRPLSGQAPGSPPSTRPPPWLSELPENTSLQEHGVKLGPALTRKVSCARGVDLETLTENKLHAEGIDLTEEPYSDKHGRCGIPEALVQRYAEDLDQPERDVAANMDQIRVKQLRKQHRMAIPSGGLTEICRKPVSPGCISSVSDWLISIGLPMYAGTLSTAGFSTLSQVPSLSHTCLQEAGITEERHIRKLLSAARLFKLPPGPEAM

SEQ ID NO: 1141 - protein, 106 aa, Homo sapiens
  SITE (80): Xaa equals any of the naturally occurring L-amino acids
NLEGKLTSSSSSKIMARDLVMFRDVAVDFSQEEWECLNSYQRNLYRDVILENYSNLVSLGCSISKPDVITLLEQGKEPWXVVRDEKRRWTLGPTFKYHHLGIRVST

SEQ ID NO: 1142 - protein, 174 aa, Homo sapiens
  SITE (57): Xaa equals any of the naturally occurring L-amino acids
GEALRVGTRGCRRDLPDPQARIFIQKKDLEEDESVTAAHLKSRGRSPRKIDQFCNSXNMVHGSVTFRDVAIDFSQEEWECLQPDQRTLYRDVMLENYSHLISLGSSISKPDVITLLEQEKEPWMVVRKETSRRYPDLELKYGPEKVSPENDTSEVNLPKQVIKQISTKKKKKKL

SEQ ID NO: 1143 - protein, 119 aa, Homo sapiens
  SITE (21): Xaa equals any of the naturally occurring L-amino acids
  SITE (119): Xaa equals any of the naturally occurring L-amino acids
EPGKRTLLAVGNCRVMPQVTXNDVAIDFTHEEWGWLSSAQRDLYKDVMVQNYENLVSVAGLSVTKPYVITLLEDGKEPWMMEKKLSKGMIPDWESRWENKELSTKKDNYDEDSPQTVIX

SEQ ID NO: 1144 - protein, 134 aa, Homo sapiens
  SITE (84): Xaa equals any of the naturally occurring L-amino acids
  SITE (128): Xaa equals any of the naturally occurring L-amino acids
FLRPHSPAILTLFLRRGSHRLGSTSHFPQEKTHNHDPQPGDPNSRPSSPKPAQPALKMQVLYEFEARNPRELTVVQGEKLEVLXHSKRWWLVKNEAGRSGYIPSNILEPLQPGTPGTQGQSPSRVLPXLDYPEP

SEQ ID NO: 1145 - protein, 179 aa, Homo sapiens
STLRIPGPCFPSEKTHNHDPQPGDPNSRPSSPKPAQPALKMQVLYEFEARNPRELTVVQGEKLEVLDHSKRWWLVKNEAGRSGYIPSNILEPLQPGTPGTQGQSPSRVPMLRLSSRPEEVTDWLQAENFSTATVRTLGSLTGSQLLRIRPGELQMLCPQEAPRILSRLEAVRRMLGISP

SEQ ID NO: 1146 - protein, 258 aa, Homo sapiens
  SITE (28): Xaa equals any of the naturally occurring L-amino acids
  SITE (228): Xaa equals any of the naturally occurring L-amino acids
CQEKTSPKGVENPAVQESNQKMLGPPLXWLKTLASKRNAVAFRSFNSHINASNNSEPSRMNMTSLDAMDISCAYSGSYPMAITPTQKRRSCMPHQTPNQIKSGTPYRTPKSVRRGVAPVDDGRILGTPDYLAPELLLGRAHGPAVDWWALGVCLFEFLTGIPPFNDETPQQVFQNILKRDIPWPEGEEKLSDNAQSAVEILLTIDDTKRAGMKELKRHPLFSDVDWEXLQHQTMPFIPRSQMMKQIPPILKPGILLST

SEQ ID NO: 1147 - protein, 320 aa, Homo sapiens
  SITE (1): Xaa equals any of the naturally occurring L-amino acids
  SITE (109): Xaa equals any of the naturally occurring L-amino acids
XGIEELSDPSGPKSYSITEKHYAQEDPRMLFVAAVDHSSSGDMSLLPSSDPKFQGLGVVESAVTANNTEESLFRICSPLSGANEYIASTDTLKTEEVLLFTDQTDDLAXEEPTSLFQRDSETKGESGLVLEGDKEIHQIFEDLDKKLALASRFYIPEGCIQRWAAEMVVALDALHREGIVCRDLNPNNILLNDRGHIQLTYFSRWSEVEDSCDSDAIERMYCAPEVGAITEETEACDWWSLGAVLFELLTGKTLVECHPAGINTHTTLNMPECVSEEARSLIQQLLQFNPLERLGAGVAGVEDIKSHPFFTPVDWAELMR

SEQ ID NO: 1148 - protein, 192 aa, Homo sapiens
  SITE (24): Xaa equals any of the naturally occurring L-amino acids
KPTCNELIKTIIIQHENIFPSPRXLEGPVYSRGGSMEDYCDSPHGETTSVEDSTQDVTAEHHTSDDECEPIEAIAKFDYVGRTARELSFKKGASLLLYQRASDDWWEGRHNGIDGLIPHQYIVVQDTEDGVVERSSPKSEIEVISEPPEEKVTARAGASCPSGGHVARYLSCKHQQAKEASRIWEASENFSE

SEQ ID NO: 1149 - protein, 214 aa, Homo sapiens
NDRVGLLQRQLLQLPQAFADCDGFKIPILGVHLKDLIAVHVIFPDWTEENKVNIVKMHQLSVTLSELVSLQNASHHLEPNMDLINLLTLSLDLYHTEDDIYKLSLVLEPRNSKSQPTSPTTPNKPVVPLEWALGVMPKPDPTVINKHIRKLVESVFRNYDHDHDGYISQEDFESIAANFPFLDSFCVLDKDQDGLISKDEMMAYFLRAKSQLHC

SEQ ID NO: 1150 - protein, 299 aa, Homo sapiens
  SITE (22): Xaa equals any of the naturally occurring L-amino acids
  SITE (26): Xaa equals any of the naturally occurring L-amino acids
  SITE (197): Xaa equals any of the naturally occurring L-amino acids
  SITE (285): Xaa equals any of the naturally occurring L-amino acids
  SITE (286): Xaa equals any of the naturally occurring L-amino acids
  SITE (289): Xaa equals any of the naturally occurring L-amino acids
  SITE (296): Xaa equals any of the naturally occurring L-amino acids
PLRPSALQGPDTETSIVKKSCXPRWXETFEFELQEGAMEALCVEAWDWDLVSRNDFLGKVVIDVQRLRVVQQEEGWFRLQPDQSKSRRHDEGNLGSLQLEVRLRDETVLPSSYYQPLVHLLCHEVKLGMQGPGQLIPLIEETTSTECRQDVATNLLKLFLGQGLAKDFLDLLFQLELSRTSETNTLFRSNSLASKSXESFLKVAGMQYLHGVLGPIINKVFEEKKYVELDPSKVEVKDVGCSGLHRPQTEAEVLEQSAQTLRAHLGALLSALSRSVRACPAVVRXXFRXLFRRVRXRFP

SEQ ID NO: 1151 - protein, 130 aa, Homo sapiens
  SITE (15): Xaa equals any of the naturally occurring L-amino acids
  SITE (67): Xaa equals any of the naturally occurring L-amino acids
  SITE (97): Xaa equals any of the naturally occurring L-amino acids
PATPSNFLPKKTPLXEEMTPPPKPPRLYLPQEPTSEETPRTKRPHMEPRTRRGPSPPASPTRKPPRXQDFRCLAVLGRGHFGKVLLVQFKGTGKYYXIKALKKQEVLSRDEIESLYCEKRIPGRLWGCTG

SEQ ID NO: 1152 - protein, 119 aa, Homo sapiens
  SITE (10): Xaa equals any of the naturally occurring L-amino acids
  SITE (112): Xaa equals any of the naturally occurring L-amino acids
  SITE (116): Xaa equals any of the naturally occurring L-amino acids
LRAGSLKYSXLQAEGNFDPSCCFTIYHGNHMESLDLITSNPEEARTWITGLKYLMAGISDEDSLAKRQRTHDQWVKQTFEEADKNGDGLLNIEEIHQLMHKLNVNLPRRKVXQMFXEAD

SEQ ID NO: 1153 - protein, 378 aa, Homo sapiens
  SITE (81): Xaa equals any of the naturally occurring L-amino acids
  SITE (85): Xaa equals any of the naturally occurring L-amino acids
  SITE (105): Xaa equals any of the naturally occurring L-amino acids
  SITE (106): Xaa equals any of the naturally occurring L-amino acids
  SITE (179): Xaa equals any of the naturally occurring L-amino acids
  SITE (308): Xaa equals any of the naturally occurring L-amino acids
  SITE (366): Xaa equals any of the naturally occurring L-amino acids
  SITE (375): Xaa equals any of the naturally occurring L-amino acids
ELDPKCRGLPFSSFLILPFQRITRLKLLVQNILKRVEERSERECTALDAHKELEMVVKACNEGVRKMSRTEQMISIQKKMXFKIXSVPIISHSRWLLKQGELQQXXGPKTSRTLRTKKLFHEIYLFLFNDLLVICRQIPGDKYQVFDSAPRGLLRVEELEDQGQTLANVFILRLLENAXDREATYMLKASSQSEMKRWMTSLAPNRRTKFVSFTSRLLDCPQVQCVHPYVAQQPDELTLELADILNILDKTDDGWIFGERLHDQERGWFPSSMTEEILNPKIRSQNLKECFRVHKMDDPQRSRTRTAXSWAAGIGNDPHPGGQREQGLHETPTEGGGGALGSTGQHLPRWQDLAWGARPSSLPTHXCSCVLAPCXQTG

SEQ ID NO: 1154 - protein, 497 aa, Homo sapiens
  SITE (495): Xaa equals any of the naturally occurring L-amino acids
  SITE (497): Xaa equals any of the naturally occurring L-amino acids
ARGVPVECPQPEKIPNGIIDVQGLAYLSTALYTCKPGFELVGNTTTLCGENGHWLGGKPTCKAIECLKPKEILNGKFSYTDLHYGQTVTYSCNRGFRLEGPSALTCLETGDWDVDAPSCNAIHCDSPQPIENGFVEGADYSYGAIIIYSCFPGFQVAGHAMQTCEESGWSSSIPTCMPIDCGLPPHIDFGDCTKLKDDQGYFEQEDDMMEVPYVTPHPPYHLGAVAKTWENTKESPATHSSNFLYGTMVSYTCNPGYELLGNPVLICQEDGTWNGSAPSCISIECDLPTAPENGFLRFTETSMGSAVQYSCKPGHILAGSDLRLCLENRKWSGASPRCEAISCKKPNPVMNGSIKGSNYTYLSTLYYECDPGYVLNGTERRTCQDDKNWDEDEPICIPVDCSSPPVSANGQVRGDEYTFQKEIEYTCNEGFLLEGARSRVCLANGSWSGATPDCVPVRCATPPQLANGVTEGLDYGFMKEVTFHCHEGYILHGAXKX

SEQ ID NO: 1155 - protein, 88 aa, Homo sapiens
  SITE (59): Xaa equals any of the naturally occurring L-amino acids
GTGEQYVVVANYQKQESSEISLSVGQVVDIIEKNESGWWFVSTAEEQGWVPATCLEARXGCRMSFLCSLKKRRSTQSSTRTQLGTRMK

SEQ ID NO: 1156 - protein, 229 aa, Homo sapiens
  SITE (60): Xaa equals any of the naturally occurring L-amino acids
  SITE (65): Xaa equals any of the naturally occurring L-amino acids
  SITE (124): Xaa equals any of the naturally occurring L-amino acids
KCGRIGWYTQRTHFQSLLEAHDIVASKCYDSPPSSPEMNNSSINNQLLPVDAIRILGIHXRAGEXLGVTFRVENNDLVIARILHGGMIDRQGLLHVGDIIKEVNGHEVGNNPKELQELLKNISXSVTLKILPSYRDTITPQQVFVKCHFDYNPYNDNLIPCKEAGLKFSKGEILQIVNREDPNWWQASHVKEGGSAGLIPSQFLEEKRKAFVRRDWDNSGPFCGTISSK

SEQ ID NO: 1157 - protein, 111 aa, Homo sapiens
LVPQEYAAKIINTKKLSARDHQKLEREARICRLLKHPNIVRLHDSISEEGFHYLVFDLVTGGELFEDIVAREYYSEADASHCIQQILESVNHCHLNGIVHRDLKPEEFAFS

SEQ ID NO: 1158 - protein, 112 aa, Homo sapiens
GPYSGPFCGRARVHTDFTPSPYDTDSLKIKKGDIIDIICKTPMGMWTGMLNNKVGNFKFIYVDVISEEEAAPKKIKANRRSNSKKSKTLQEFLERIICRNTPQHFCSMVMRL

SEQ ID NO: 1159 - protein, 188 aa, Homo sapiens
  SITE (28): Xaa equals any of the naturally occurring L-amino acids
  SITE (65): Xaa equals any of the naturally occurring L-amino acids
IKLKAEARLDLLKQIGVSVDTWLKSAMXQVMEELENERWARPPAVTSNGTLHSLNADTEREEGEXFEDNMDVFDDSSSSPSGTLRNYPLTCKVVYSYKASQPDELTIEEHEVLEVIEDGDMEDWVKARNKVGQVGYVPEKYLQFPTSNSLLSMLQSLAALDSRSHTSSNSTEAELVSGSLNGDASGKD

SEQ ID NO: 1160 - protein, 97 aa, Homo sapiens
  SITE (47): Xaa equals any of the naturally occurring L-amino acids
NCKILDTIGRGTFSEVQDHMLIGTQMAIKIIPKAGSLGITLQRVISXLKLLCHFNIVRLYQVIDTPNTSYLFSNGVCKRRTPTQPIHHHGLMREEKA

SEQ ID NO: 1161 - protein, 250 aa, Homo sapiens
  SITE (240): Xaa equals any of the naturally occurring L-amino acids
ADAWAAASRVGSNRSRARAGGGAMACAGLLTVCLLRPPAPQPQPQTPRHPQLAPDPGPAGHTLFQDVFRRADKNDDGKLSFEEFQNYFADGVLSLGELQELFSGIDGHLTDNLETEKLCDYFSEHLGVYRPVLAALESLNRAVLAAMDATKLEYERASKVDQFVTRFLLRETVSQLQALQSSLEGASDTLEAQAHGWRSDAESVEAQSRLCGSRRAGRRALRSVSRSSTWSPGSSDTGRXQRPRCSGGSR

SEQ ID NO: 1162 - protein, 127 aa, Homo sapiens
  SITE (89): Xaa equals any of the naturally occurring L-amino acids
  SITE (99): Xaa equals any of the naturally occurring L-amino acids
  SITE (113): Xaa equals any of the naturally occurring L-amino acids
EYPTLQKDFRRTTYANSSLIKYMEKHKVKPDSKVFLLLQKLLTMDPTKRITSEQALQDPYFQEDPLPTLDVFAGCQIPYPKRRNSLMEXDPGRKKVDKXSATAAEPSISSPQXLPQQGSSPFPQGGP

SEQ ID NO: 1163 - protein, 280 aa, Homo sapiens
ADAWADAWADAWVSPVSRQSIRNSQKHSPTSEPTPPGDALPPVSSPHTHRGYQPTPAMAKYVKILYDFTARNANELSVLKDEVLEVLEDGRQWWKLRSRSGQAGYVPCNILGEARPEDAGAPFEQAGQKYWGPASPTHKLPPSFPGNKDELMQHMDEVNDELIRKISNIRAQPQRHFRVERSQPVSQPLTYESGPDEVRAWLEAKAFSPRIVENLGILTGPQLFSLNKEELKKVCGEEGVRVYSQLTMQKAFLEKQQSGSELEELMNKFHSMNQRRGEDS

SEQ ID NO: 1164 - protein, 243 aa, Homo sapiens
  SITE (50): Xaa equals any of the naturally occurring L-amino acids
  SITE (232): Xaa equals any of the naturally occurring L-amino acids
RAGRRCGLWGLLLPARRGLPLAPWPRGASSRPQHTLPTPPPRLPPPGPKXYLCTLPPALLSREILMADSEALPSLAGDPVAVEALLRAVFGVVVDEAIQKGTSVSQKVCEWKEPEELKQLLDLELRSQGESQKQILERCRAVIRYSVKTGHPRFFNQLFSGLDPHALAGRIITESLNTSHVTTPSRRELRFWDLAPTVSEWSRLMREGKWSPRIWRGRLVWPRLRVLCRSWXVPPLAPLSRGL

SEQ ID NO: 1165 - protein, 439 aa, Homo sapiens
  SITE (166): Xaa equals any of the naturally occurring L-amino acids
  SITE (260): Xaa equals any of the naturally occurring L-amino acids
  SITE (305): Xaa equals any of the naturally occurring L-amino acids
  SITE (360): Xaa equals any of the naturally occurring L-amino acids
FSLEALQTIHKQMDDDKDGGIEVEESDEFIREDMKYKDATNKHSHLHREDKHITIEDLWKRWKTSEVHNWTLEDTLQWLIEFVELPQYEKNFRDNNVKGTTLPRIAVHEPSFMISQLKISDRSHRQKLQLKALDVVLFGPLTRPPHNWMKDFILTVSIVIGVGGCXFAYTQNKTSKEHVAKMMKDLESLQTAEQSLMDLQERLEKAQEENRNVAVEKQNLERKMMDEINYAKEEACRLRELREGAECELSRRQYAEQELXQVRMALKKAEKEFELRSSWSVPDALQKWLQLTHEVEVQYYNIKRXNAEMQLAIAKDEAEKIKKKRSTVFGTLHVAHSSSLDEVDHKILEAKKALSELTTXLRERLFRWQQIEKICGFQIAHNSGLPSLTSSLYSDHSWVVMPRVSIPPYPIAGGVDDLDEDTPPIVSQFPGKWLNLLDH

SEQ ID NO: 1166 - protein, 169 aa, Homo sapiens
  SITE (124): Xaa equals any of the naturally occurring L-amino acids
  SITE (163): Xaa equals any of the naturally occurring L-amino acids
  SITE (169): Xaa equals any of the naturally occurring L-amino acids
EHCFSFPETLLPGLKSKKWSKKFFSFIEGCLVKNYMQRPSTEQLLKHPFIRDQPNERQVRIQLKDHIDRTRKKRGEKDETEYEYSGSEEEEEEVPEQEGEPSSIVNVPGESTLRRDFLRLQQEXKERSEALRRQQLLQEQQLREQEEYKRQLLAERQNGLSSXKNRGDX

SEQ ID NO: 1167 - protein, 237 aa, Homo sapiens
  SITE (67): Xaa equals any of the naturally occurring L-amino acids
  SITE (119): Xaa equals any of the naturally occurring L-amino acids
ARIARDLQGSPEHKTKPGKAPEKSREFSPYIDINGTCDKLTPFWFTLWSQRGKCEDQKVECLYEALXRAGDRLLGSFPTAVPLALHSSISYLGFFVSGSPADVIREFAMTFATEASLLXDCSVKPCTKQLHLTLAHKFYPHHQRTLEQLARAIPLGHSCQWTAALYSRDMRFVHYQTLRALFQYKPQNVDELTLSPGDYIFVDPTQQDEASEGWVIGISQRTGCRGFLPENYTGSSQ

SEQ ID NO: 1168 - protein, 277 aa, Homo sapiens
  SITE (30): Xaa equals any of the naturally occurring L-amino acids
  SITE (177): Xaa equals any of the naturally occurring L-amino acids
  SITE (187): Xaa equals any of the naturally occurring L-amino acids
  SITE (188): Xaa equals any of the naturally occurring L-amino acids
  SITE (209): Xaa equals any of the naturally occurring L-amino acids
  SITE (225): Xaa equals any of the naturally occurring L-amino acids
  SITE (272): Xaa equals any of the naturally occurring L-amino acids
TARGMVPGSEGPARAGSVVADVVFVIEGTXNLGPYFEGLRKHYLLPAIEYFNGGPPAETDFGGDYGGTQYSLVVFNTVDCAPESYVQCHAPTSSAYEFVTWLDGIKFMGGGGESCSLIAEGLSTALQLFDDFKKMREQIGQTHRVCLLICNSPPYLLPAVESTTYSGCTTENLVQQXGERGIHFSIXXPRKLPALRLLFEKAAPPALLXPLQPPTDVSQDPRHMXLVRGLVLPVGGGSAPGPLQSKQPAPLPPAAPSGATLSAAPQQPLPPXPPQYQ

SEQ ID NO: 1169 - protein, 234 aa, Homo sapiens
  SITE (46): Xaa equals any of the naturally occurring L-amino acids
  SITE (47): Xaa equals any of the naturally occurring L-amino acids
  SITE (173): Xaa equals any of the naturally occurring L-amino acids
  SITE (200): Xaa equals any of the naturally occurring L-amino acids
LKTMKRFFGRRPILHSLSPPACQHHPQMRHQGSRRDKAREPRGPWXXYNLCLELEDGDNPYPSKEDTPTSSLDSLSSPSPVTTAVPGPPGPDKNHLLADGGSFGDWASTIPGQTRSSMVQWLNPQSPTTTSSNSAVTPLSPGSSPFPFSPPATVADKPPESIRSRKARAVYPXEAEHSSELSFEIGAIFEDVQTSREPGXARRDSERQEGADSTELRQAAVAPGLRAPADPGTQ

SEQ ID NO: 1170 - protein, 100 aa, Homo sapiens
  SITE (94): Xaa equals any of the naturally occurring L-amino acids
  SITE (100): Xaa equals any of the naturally occurring L-amino acids
ADAPKDPVPALPTHPPAQEQDCVVVITREVPHQTASDFVRDSAASHQAEPEAYERRVCFLLLQLCNGLEHLKEHGIIHRDLCLENLLLVHCTLXVGPARX

SEQ ID NO: 1171 - protein, 154 aa, Homo sapiens
KPENILVSQSGITKLCDFGFARTLAAPGDIYTDYVATRWYRAPELVLKDTSYGKYVYFGILSAFPRPVDIWALGCMIIEMATGNPYLPSSSDLDLLHKIVLKVGNLSPHLQNIFSKSPIFAGVVLPQVQHPKNARKKYPKLNGLLADIVHACYN

SEQ ID NO: 1172 - protein, 142 aa, Homo sapiens
  SITE (130): Xaa equals any of the naturally occurring L-amino acids
  SITE (141): Xaa equals any of the naturally occurring L-amino acids
IVKLFEVIETEKTLYLVMEYASAGEVFDYLVSHGRMKEKEARAKFRQIVSAVHYCHQKNIVHRDLKAENLLLDAEANIKIADFGFSNEFTLGSKLDTFCGSPPYAARTVSGQEVPRPEVDIGPGNHLSPXSAVPAFTAQPXD

SEQ ID NO: 1173 - protein, 244 aa, Homo sapiens
  SITE (39): Xaa equals any of the naturally occurring L-amino acids
  SITE (79): Xaa equals any of the naturally occurring L-amino acids
LVQKKDTGHIYAMKILRKSDMLEKEQVAHIRAERDILVXADGAWVVKMFYSFQDKRNLYLIMEFLPGGDMMTLLMKKDXLTEEETQFYISETVLAIDAIHQLGFIHRDIKPDNLLLDAKGHVKLSDFGLCTGLKKAHRTEFYRNLTHNPPSDFSFQNMNSKRKAETWKKNRRQLAYSTVGTPDYIAPEVFMQTGYNKLCDWWSLGVIMYEMLIGYPPFCSETPQETYRKVMNWKETLVFPPEVP

SEQ ID NO: 1174 - protein, 140 aa, Homo sapiens
  SITE (122): Xaa equals any of the naturally occurring L-amino acids
  SITE (131): Xaa equals any of the naturally occurring L-amino acids
YPAVGAREDRMSHPSGPYSQASAAAPQPAAARQPPPPEEEEEEANSYDSDEATTLGALEFSLLYDQDNSSLQCTIIKAKGLKPMDSNGLADPYVKLHLLPGASKSNKLRTKTLRDYPDPHLXMRTLVFSRXFTDGGHGKR

SEQ ID NO: 1175 - protein, 173 aa, Homo sapiens
  SITE (141): Xaa equals any of the naturally occurring L-amino acids
  SITE (171): Xaa equals any of the naturally occurring L-amino acids
AGDVIKVLDASNKDWWWGQIDDEEGWFPASFVRLWVNQEDEVEEGPSDVQNGHLDPNSDCLCLGRALQNRDQMRANVINEIMSTERHYIKHLKDICEGYLKQCRKRRDMFSDEQLKVIFGNIEDIYRFQMGFVRDLEKQYXNDDPHLSEIGPCFLEHQVEFSLDLTRLNLXKG

SEQ ID NO: 1176 - protein, 276 aa, Homo sapiens
  SITE (17): Xaa equals any of the naturally occurring L-amino acids
  SITE (181): Xaa equals any of the naturally occurring L-amino acids
  SITE (233): Xaa equals any of the naturally occurring L-amino acids
  SITE (254): Xaa equals any of the naturally occurring L-amino acids
GDTIEGTPAGTGPEFPXRPTRPVNGGELFFHLQRERSFPEHRARFYAAEIASALGYLHSIKIVYRDLKPENILLDSVGHVVLTDFGLCKEGIAISDTTTTFCGTPEYLAPEVIRKQPYDNTVDWWCLGAVLYEMLYGLPPFYCRDVAEMYDNILHKPLSLRPGVSLTAWSILEELLEKDRXNRLGAKEDFLEIQNHPFFESLSWADLVQKKIPPPFNPNVAGPDDIRNFDTAXTEETVPYSVCVSSDYSIVNAXVLEADDAFVGFSYAPPSEDLFL

SEQ ID NO: 1177 - protein, 71 aa, Homo sapiens
KLKNKLTLDSWLRVEVFFKLWRKHFCKSLMTHFRCSKNKHPFHVCLEKEITEAFLTNTLWLKMFSRIGQWG

SEQ ID NO: 1178 - protein, 146 aa, Homo sapiens
  SITE (144): Xaa equals any of the naturally occurring L-amino acids
RDLYTGLKAGLTLETRLQIALDVVEGIRFLHSQGLVHRDIKLKNVLLDKQNRAKITDLGFCKPEAMMSGSIVGTPIHMAPELFTGARPERLPVFDEECWQLMEACWDGDPLKRPLLGIVQPMLQGIMNRLCKSNSEQPNRGLDXST

SEQ ID NO: 1179 - protein, 129 aa, Homo sapiens
PASSGQEMQSTANYLWHTDDLLGQGATASVYKARNKKSGELVAVKVFNTTSYLRPREVQVREFEVLRKLNHQNIVKLFAVEETGGSRQKVLVMEYCSSGSLLSVLESPENAFGLPEDEFLVVLRCVVAA

SEQ ID NO: 1180 - protein, 192 aa, Homo sapiens; identical to SEQ ID NO: 904

SEQ ID NO: 1181 - protein, 280 aa, Homo sapiens
  SITE (5): Xaa equals any of the naturally occurring L-amino acids
  SITE (240): Xaa equals any of the naturally occurring L-amino acids
  SITE (244): Xaa equals any of the naturally occurring L-amino acids
  SITE (245): Xaa equals any of the naturally occurring L-amino acids
  SITE (250): Xaa equals any of the naturally occurring L-amino acids
  SITE (256): Xaa equals any of the naturally occurring L-amino acids
  SITE (258): Xaa equals any of the naturally occurring L-amino acids
  SITE (270): Xaa equals any of the naturally occurring L-amino acids
PLGFXKKLLGDTIEGTPAGTGPEFPGRPTVRYPAGATARRLARGCWSALWDYETPKVIVVRNRRLGVLYRAVQLLILLYFVWYVFIVQKSYQESETGPESSIITKVKGITTSEHKVWDVEEYVKPPEGGSVFSIITRVEATHSQTQGTCPESIRVHNATCLSDADCVAGELDMLGNGLRTGRCVPYYQGPSKTCEVFGWCPVEDGASVSQFLGTMAPNFTILIKNSIHYPKFHFSKGNIXDRTXXYLKRXTFTRPXTXTAPSSSGFIVEXAGESFTELAH

SEQ ID NO: 1182 - protein, 109 aa, Homo sapiens
  SITE (91): Xaa equals any of the naturally occurring L-amino acids
GPARGRGHLSSGASPRNGATQDPCARAGGTLWPQACAPPWHTAPDTSSPAGTYRAAHFPSPLTATWNPSQLSSEGSAPGLGPWEPHPTPPXRRCNLESAQTLPLEVTTY

SEQ ID NO: 1183 - protein, 102 aa, Homo sapiens
TCKRTMKDYDELLKYYELHETIGTGGFAKVKLACHILTGEMVAIKIMDKNTLGSDLPRIKTEIEALKNLRHQHICQLYHVLETANKIFMVLSTALEESCLTI

SEQ ID NO: 1184 - protein, 150 aa, Homo sapiens
  SITE (125): Xaa equals any of the naturally occurring L-amino acids
  SITE (138): Xaa equals any of the naturally occurring L-amino acids
TQETYSPTKASNLLRSSGTVYPKRPEKPVPPPPPIAKINGEVSSISSKFETEPVSKLKLDSEQLPLRPKSVDFDSLTVRTSKETDVVNFDDIASSENLLHLTANRPKMPGRRLPGRFNGGHSPTXSPEKILKLPKEEXSANLKPSEKKKK

SEQ ID NO: 1185 - protein, 212 aa, Homo sapiens
  SITE (164): Xaa equals any of the naturally occurring L-amino acids
  SITE (165): Xaa equals any of the naturally occurring L-amino acids
  SITE (167): Xaa equals any of the naturally occurring L-amino acids
  SITE (168): Xaa equals any of the naturally occurring L-amino acids
  SITE (193): Xaa equals any of the naturally occurring L-amino acids
  SITE (207): Xaa equals any of the naturally occurring L-amino acids
  SITE (212): Xaa equals any of the naturally occurring L-amino acids
AARVPNASQPVSGSRSRPQPGRIMAAAKVALTKRADPAELRTIFLKYASIEKNGEFFMSPNDFVTRYLNIFGESQPNPKTVELLSGVVDQTKDGLISFQEFVAFESVLCAPDALFMVAFQLFDKAGKGEVTFEDVKQVFGQTTIHQHIPFNWDSEFVQLHFGKXXKXXPDICGIYSVFIWKSTGARQASLCAXGHARTGRVQPSIPXIWHIX

SEQ ID NO: 1186 - protein, 246 aa, Homo sapiens
  SITE (228): Xaa equals any of the naturally occurring L-amino acids
PLHRQTPSPLCERTKPQKSLHLLRLAISRGPLAPSSLMSCVKLWPSGAPAPLVSIEELENQELVGKGGFGTVFRAQHRKWGYDVAVKIVNSKAISREVKAMASLDNEFVLRLEGVIEKVNWDQDPKPALVTKFMENGSLSGLLQSQCPRPWPLLCRLLKEVVLGMFYLHDQNPVLLHRDLKPSNVLLDPELHVSWQILACPHFREATVRDRVRGARGHPGLLGPRTVXNVNRKASTASDVLQLRGS

SEQ ID NO: 1187 - protein, 101 aa, Homo sapiens
  SITE (2): Xaa equals any of the naturally occurring L-amino acids
KXQEGCPPGWMQPQQHTDPGKLPEALSGTKVMRVSNKMRFLQLNFQRDPEEIIWSMSPVVDGVVIPDDPLVLLTQGKVSSVPYLLGVNNLEFNWLLPYVSE

SEQ ID NO: 1188 - protein, 110 aa, Homo sapiens
QKEISESLSVTRDQDEDDKAPEPTWADDVPATTSSEATTTPRPLLSTPVDGAEDPRCLEALKPGNCGEYVVRWYYDKQVNSCARFWFSGCNGSGNRFNSEKECQETCIQG

SEQ ID NO: 1189 - protein, 300 aa, Homo sapiens
  SITE (170): Xaa equals any of the naturally occurring L-amino acids
  SITE (247): Xaa equals any of the naturally occurring L-amino acids
RSADGLCGNKDRERGNEFTRNQQAAQEVVNPKKKMKKKKYVNSGTVTLLSFAVESECTFLDYIKGGTQINFTVAIDFTASNGNPSQSTSLHYMSPYQLNAYALALTAVGEIIQHYDSDKMFPALGFGAKLPPDGRVSHEFPLNGNQENPSCCGIDGILEAYHRSLRTVQXYGPTNFAPVVTHVARNAAAVQDGSQYSVLLIITDGVISDMAQTKEAIVNAAKLPMSIIIVGVGQAEFDAMVELDGDXVRISSRGKLAERDIVQFVPFRDYVDRTGNHVLSMARLARDVLAEIPDHQGGGV

SEQ ID NO: 1190 - protein, 112 aa, Homo sapiens
  SITE (16): Xaa equals any of the naturally occurring L-amino acids
  SITE (18): Xaa equals any of the naturally occurring L-amino acids
WNYFLQRMNPNGLSPXPXFPLTLQVLTPPSSLTFQANPLMSFLSLCICARCFPFFLLYWKDLHILPSLEEDFTKSHRWWPGGISESPSGALIVVPIVYPHKSSGNQPPPRWP

SEQ ID NO: 1191 - protein, 190 aa, Homo sapiens; identical to SEQ ID NO: 915

SEQ ID NO: 1192 - protein, 262 aa, Homo sapiens
ASRTKVFPGERVEHVTFNFTLENQIHRGGQYFNDKFIGLRLKSVSFEDSLFEECYFEDVTSSNTFFRNCTFINTVFYNTDLFEYKFVNSRLINSTFLHNKEGCPLDVTGTGEGAYMVYFVSFLGTLAVLPGNIVSALLMDKIGRLRMLAGSSVMSCVSCFFLSFGNSESAMIALLCLFGGVSIASWNALDVLTVELYPSDKRTTAFGFLNALCKLAAVLGISIFTSFVGITKAAPILFASAALALGSSLALKLPETRGQVLQ

SEQ ID NO: 1193 - protein, 103 aa, Homo sapiens
  SITE (96): Xaa equals any of the naturally occurring L-amino acids
LCPHFPGCQTYMDIVIVLDGSNSIYPWVEVQHFLINILKKFYIGPGQIQVGVVQYGEDVVHEFHLNDYRSVKDVVEAASHIEQRGGTETRTAFGIXFARLKKK

SEQ ID NO: 1194 - protein, 76 aa, Homo sapiens
LSPGQIQGEGNLVLPLMDEQRGHFAEEHLEWGILLQPTLKNSFCHRHSIRSRFCEDGVFLWSVSHQWSGKNAVKSD

SEQ ID NO: 1195 - protein, 119 aa, Homo sapiens
  SITE (116): Xaa equals any of the naturally occurring L-amino acids
ELMSFLTNDASSESIASFSKQEVMSSFLPEGGCYELLTVIGKGFEDLMTVNLARYKPTGEYVTVRRINLEACSMRMVTFLQGRAACLPNSSNHPNIVPYRATFIADNELWVVTSIXGNG

SEQ ID NO: 1196 - protein, 334 aa, Homo sapiens
  SITE (184): Xaa equals any of the naturally occurring L-amino acids
AGMDILKQAFVRGLPTPTARFEQRTFSVIKIFPDLSSNDMLLFIVKGINLPTPPGLSPGDLDVFVRFDFPYPNVEEAQKDKTSVIKNTDSPEFKEQFKLCINRSHRGFRRAIQTKGIKFEVVHKGGLFKTDRVLGTAQLKLDALEIACEVREILEVLDGRRPTGGRLEVMVRIREPLTAQQLEXTTERWLVIDPVPAAVPTQVAGPKGKAPPVPAPARESGNRSARPLHSLSVLAFDQERLERKILALRQARRPVPPEVAQQYQDIMQRSQWQRAQLEQGGVGIRREYAAQLERQLQFYTEAARRLGNDGSRDAAKEALYRRNLVESELQRLRR

SEQ ID NO: 1197 - protein, 684 aa, Homo sapiens
RRAEHSMAVKVQTTKRGDPHELRNIFLQYASTEVDGERYMTPEDFVQRYLGLYNDPNSNPKIVQLLAGVADQTKDGLISYQEFLAFESVLCAPDSMFIVAFQLFDKSGNGEVTFENVKEIFGQTIIHHHIPFNWDCEFIRLHFGHNRKKHLNYTEFTQFLQELQLEHARQAFALKDKSKSGMISGLDFSDIMVTIRSHMLTPFVEENLVSAAGGSISHQVSFSYFNAFNSLLNNMELVRKIYSTLAGTRKDVEVTKEEFAQSAIRYGQVTPLEIDILYQLADLYNASGRLTLADIERIAPLAEGALPYNLAELQRQQSPGLGRPIWLQIAESAYRFTLGSVAGAVGATAVYPIDLVKTRMQNQRGSGSVVGELMYKNSFDCFKKVLRYEGFFGLYRGLIPQLIGVAPEKAIKLTVNDFVRDKFTRRDGSVPLPAEVLAGGCAGGSQVIFTNPLEIVKIRLQVAGEITTGPRVSALNVLRDLGIFGLYKGAKACFLRDIPFSAIYFPVYAHCKLLLADENGHVGGLNLLAAGAMAGVPAASLVTPADVIKTRLQVAARAGQTTYSGVIDCFRKILREEGPSAFWKGTAARVFRSSPQFGVTLVTYELLQRWFYIDFGGLKPAGSEPTPKSRIADLPPANPDHIGGYRLATATFAGIENKFGLYLPKFKSPSVAVVQPKAAVAATQ

SEQ ID NO: 1198 - protein, 168 aa, Homo sapiens
AGFPLPQPACRLCLLCPRPSWLLLTGPVFPTGWFPAKFVEVLDERSKEYSIAGDDSVTEGVTDLVRGTLCPALKALFEHGLKKPSLLGGACHPWLFIEEAAGREVERDFASVYSRLVLCKTFRLDEDGKVLTPEELLYRAVQSVNVTHDAVHAQMDVKLRSLICVGLK

SEQ ID NO: 1199 - protein, 377 aa, Homo sapiens; identical to SEQ ID NO: 924

SEQ ID NO: 1200 - protein, 375 aa, Homo sapiens; identical to SEQ ID NO: 925
  SITE (1): Xaa equals any of the naturally occurring L-amino acids

SEQ ID NO: 1201 - protein, 134 aa, Homo sapiens; identical to SEQ ID NO: 926

SEQ ID NO: 1202 - protein, 165 aa, Homo sapiens
  SITE (70): Xaa equals any of the naturally occurring L-amino acids
TMRTCDSPRRRRRCMPSCKKCFWSNKRSACCLQAVMHQGNVAETTRFEKLAQDRKKQLEILQLAQAQGLXPPTHHFELKTFQTVRIFSELNSTEMHLIIVRGMNLPAPPGVTPDDLDAFVRFEFHYPNSDQAQKSKTAVVKNTNSPEFDQLFKLNINRNHRGFKR

SEQ ID NO: 1203 - protein, 206 aa, Homo sapiens
  SITE (136): Xaa equals any of the naturally occurring L-amino acids
  SITE (138): Xaa equals any of the naturally occurring L-amino acids
  SITE (145): Xaa equals any of the naturally occurring L-amino acids
  SITE (160): Xaa equals any of the naturally occurring L-amino acids
  SITE (161): Xaa equals any of the naturally occurring L-amino acids
  SITE (164): Xaa equals any of the naturally occurring L-amino acids
ISDSEIAFRALVRLACRMAGQPGHMPHGGSSNNLCHTLGPVHPPDPQRHPNTLSFRCSLADFQIEKKIGRGQFSEVYKATCLLDRKTVALKKVQIFEMMDAKARQDCVKEIGLLKQLNHPNIIKYLDSFIEDNELXIXLELADAXDLSQMIKYFKKQKRXXPGXDSMEVLCAAVQRRGAHAFTPGDAPRHQACQRVHHSHGLREAR

SEQ ID NO: 1204 - protein, 88 aa, Homo sapiens
CFLPYHTLRTVHLTTWKVGLCKDRLHKALVITLALAAANACFNPLLYYFAGENFKDRLKSALRKGHPQKAKTKCVFPVSVWLRKETRV

SEQ ID NO: 1205 - protein, 573 aa, Homo sapiens
  SITE (185): Xaa equals any of the naturally occurring L-amino acids
  SITE (216): Xaa equals any of the naturally occurring L-amino acids
  SITE (234): Xaa equals any of the naturally occurring L-amino acids
  SITE (255): Xaa equals any of the naturally occurring L-amino acids
  SITE (269): Xaa equals any of the naturally occurring L-amino acids
  SITE (275): Xaa equals any of the naturally occurring L-amino acids
RTGRAGGERPRVGSGPRGTMSAKVRLKKLEQLLLDGPWRNESALSVETLLDVLVCLYTECSHSALRRDKYVAEFLEWAKPFTQLVKEMQLHREDFEIIKVIGRGAFGEVAVVKMKNTERIYAMKILNKWEMLKRAETACFREERDVLVNGDCQWITALHYAFQDENHLYLVMDYYVGGDLLTLLXKFEDKLPEDMARFYIGEMVLAIDSIHQLHYXHRDIKPDNVLLDVNGHIXLADFGSCLKMNDDGTVQSSVXVGTPDYISPEILQXMEDGMXKYGPECDWWSLGVCMYEMLYGETPFYAESLVETYGKIMNHEERFQFPSHVTDVSEEAKDLIQRLICSRERRLGQNGIEDFKKHAFFEGLNWENIRNLEAPYIPDVSSPSDTSNFDVDDDVLRNTEILPPGSHTGFSGLHLPFIGFTFTTESCFSDRGSLKSIMQSNTLTKDEDVQRDLEHSLQMEAYERRIRRLEQEKLELSRKLQESTQTVQSLHGSSRALSNSNRDKEIKKLNEEIERLKNKIADSNRLERQLEDTVALRQEREDSTQRLRGLEKQHRVVRQEKEELHKQLVEASE

SEQ ID NO: 1206 - protein, 177 aa, Homo sapiens; identical to SEQ ID NO: 932

SEQ ID NO: 1207 - DNA, 494 bp, Homo sapiens
caaggggagaggtacatcttggtgaaaaagaccaatgatgactggtggcaagtcaagccagatgaaaactccaaagcgttttatgtgccagcccagtatgtgaaggaggtcacgcgcaaagctctcatgccacctgttaagcaggtagctggtctgccaaataactccacgaaaataatgcagagtttgcatcttcagagatcaacagaaaatgtgaacaaattgcctgagctttcaagtttcggaaagccatcgtcatctgttcaaggaacaggtcttattcgtgatgccaatcagaattttggacccagttataatcaaggtcagactgtcaacctaagcctggacctgacccataataacggaaagtttaacaatgactcacattctcctaaagtttccagccagaataggacacgctcatttggtcattttcccggtccagagttcttggatgtagagaaaactagcttctcccaggaacaatcttgtga

SEQ ID NO: 1208 - DNA, 494 bp, Homo sapiens; identical to SEQ ID NO: 1207

SEQ ID NO: 1209 - DNA, 2046 bp, Homo sapiens
cctgcttgaagcctaactgtccaccagaaaggactgctctttgggtgagttgaacttcttccattatagaaagaattgaaggctgagaaactcaggtaagcacttttgttgtgggtatacttttaccttcttggtctcctcatctcccaggtggtaacaaacagaaatgactaaagcctatatgtgtgtgtagtggaaaggagcagagggaactgaatacagagaggatcctgaatacacgatgctgaatagagagaggggactcctgggggtctttggggatggggaaggaattaaaaaagttggagggcactgggtttactgagagcagcgggatggatatagaagaggactgaggtttggagcagaataagactaagatatttaggcaagagatatttagataaaaacttggggaaatatttgagaatgggaaaggactaagagaacctaaggagagagttagggatcttgagatgaagaggcctgggaatggttcaggaggatactgaattaaggtgaggtccaggaacagtttagatgtccagggtcccagaactgttcaagagatctaagttgaatgctaggttctgattccctcttcctcttccaccctctgcctctttagcctctatcatgtggaacagctctgacgccaacttctcctgctaccatgagtctgtgctgggctatcgttatgttgcagttagctggggggtggtggtggctgtgacaggcaccgtgggcaatgtgctcaccctactggccttggccatccagcccaagctccgtacccgattcaacctgctcatagccaacctcacactggctgatctcctctactgcacgctccttcagcccttctctgtggacacctacctccacctgcactggcgcaccggtgccaccttctgcagggtatttgggctcctcctttttgcctccaattctgtctccatcctgaccctctgcctcatcgcactgggacgctacctcctcattgcccaccctaagctttttccccaagttttcagtgccaaggggatagtgctggcactggtgagcacctgggttgtgggcgtggccagctttgctcccctctggcctatttatatcctggtacctgtagtctgcacctgcagctttgaccgcatccgaggccggccttacaccaccatcctcatgggcatctactttgtgcttgggctcagcagtgttggcatcttctattgcctcatccaccgccaggtcaaacgagcagcacaggcactggaccaatacaagttgcgacaggcaagcatccactccaaccatgtggccaggactgatgaggccatgcctggtcgtttccaggagctggacagcaggttagcatcaggaggacccagtgaggggatttcatctgagccagtcagtgctgccaccacccagaccctggaaggggactcatcagaagtgggagaccagatcaacagcaagagagctaagcagatggcagagaaaagccctccagaagcatctgccaaagcccagccaattaaaggagccagaagagctccggattcttcatcggaatttgggaaggtgactcgaatgtgttttgctgtgttcctctgctttgccctgagctacatccccttcttgctgctcaacattctggatgccagagtccaggctccccgggtggtccacatgcttgctgccaacctcacctggctcaatggttgcatcaaccctgtgctctatgcagccatgaaccgccaattccgccaagcatatggctccattttaaaaagagggccccggagtttccataggctccattagaactgtgaccctagtcaccagaattcaggactgtctcctccaggaccaaagtggccaggtaataggagaataggtgaaataacacatgtgggcattttcacaacaatctctccccagcctcgccagagatcaagtctctccatcacttgatcaatgtttcagccctagactgcccaaggagtattattaattattaataaatgaattctgtgcttttaa

SEQ ID NO: 1210 - DNA, 1310 bp, Homo sapiens
caattcatacacatgcaatcatacatgcacactgactctgaactgggtgaactctgtggagggaggcccagaatgggtgctttcaccaagaatttgtctgtgtacaactctagatggagtgggccagcagtagctgccagtctttctcccctgcagcttcctctgcttctggaatgaaccatgtatcctggagaccctcccaatggatgagagtggaaagacatcagtacaactggacttggcttccggaaaaagattgcttttgaactttggctctcttcacttgtatgctatcattgatattcccagtggtgcccgtggaaagagggagaaagagaagctgaacaggagaaagacaaacagaaagaatagagaacaggaacgaggtggagagcaagactgacagagaaagtgtgagcaatgatgagaattttaattcaccaaggagacgtgtttttggtttgtccccccaaaccccgcccgccccactacaggttatggaaagaatcatggcattactgaggagtaaacctctctggcacactgagcatggtcagggcattggtcagagggacagagcaaggaatgcatcctgagcccacagctttgaccactgtgatccagaagagaggtgcactacgtgggaagtgctgattccacagcatgcagcctggtaggggaaggaaaataaaagggtgtgaagaaggaatagttttataatctcggaagatgataccaagagcagaggcaacaaatagaggcctggcctccaggtgccggatccagacacctgacctagaatgcctgcccgctatccctgtggcaggaaatatcccctcatgtcccagggaattgcagatgggtcttctatacccttctacctgcccttagatctccatttttatcaaatagtacattgcattttgaagttttgggttttgtccttcatctttccctttcccttcaaatcttttaatggtaagaaagcaagtgaagcttggtgcaagctaaaatttttaaatggtgtggaaatgcaaataataccaagtaaaataatacagatattattaaagtttctggttttgaggtgttgtagataaatgtatttatgtgcctagtggggaatccaatattatgaatatgaaaaagggggcaataaaagggtatgtaaaatatgtatgaagaaaaggtgtacaaaaatttgcccttatgcacggaactctgtttctaagtgccaagcacagaaagccgctaaataaaatctttgcaattgttttctgcatgtttgttcatacagaaaaatcaaataa

SEQ ID NO: 1211 - DNA, 1310 bp, Homo sapiens; identical to SEQ ID NO: 1210

SEQ ID NO: 1212 - DNA, 627 bp, Homo sapiens
agctacccagggctgagtgacagtggctacaacaggcttcagagtggcaccacttcagccactcagccctctgaaaccttcatgcctcagaggactccatccctgatctcaggaataccaactcctccctcgttgcctggcaacagcaagatggaagcctacggtggccagctggggtcctttcccacttcccagtttcagtatgtcatgcaggcaggcaatgctgcctccagctcctcatcaccacacatgttcgggggcagccacatgcagcagagctcctacaatgccttctcccttcacaacccttacaacctgtatggatacaatttccccacttcccctaggctagctgcaagcccggaaaaactgagcgcctctcaaagcactttactctgttcttctccttccaacggggcctttggagagaggcagtacctgccgtcagggatggagcacagcatgcacatgattagcccttcacccaataaccaacaggcaaccaacacttgtgatggccggcagtatggggcagttccaggctcctcctcccagatgtccgtgcacatggtttaaaggccagtccaaacaccacggagcatttggcaatcaaggccccagagtctc

SEQ ID NO: 1213 - DNA, 627 bp, Homo sapiens; identical to SEQ ID NO: 1212

SEQ ID NO: 1214 - DNA, 1140 bp, Homo sapiens
aaacaaagtatttatgtctgttgtatagtatggatgcttgctcttggtggattcctaactatgattattttaacacttaagaaaggagggcataattccacaatgtgtttccattacagagataagcataacgcaaaaggagaagccatttttaacttcattcttgtggtaatgttctggctaattttcttactaataatcctttcatatattaagattgggaagaatctattgaggatttctaaaaggaggtcaaaatttcctaattctggtaaatatgccactacagctcgtaactcctttattgtacttatcatttttactatatgttttgttccctatcatgcctttcgattcatctacatttcttcacagctaaatgtatcatcttgctactggaaagaaattgttcacaaaaccaatgagatcatgctggttctctcatctttcaatagttgcttagatccagtcatgtatttcctgatgtccagtaacattcgcaaaataatgtgccaacttctttttagacgatttcaaggtgaaccaagtaggagtgaaagcacttcagaatttaaaccaggatactccctgcatgatacatctgtggcagtgaaaatacagtctagttctaaaagtacttgaggtaaacatactaaaatgaattatataatgcagcctcttaattctttgaagaactaaaaaattaggaaacaaagttctagcatttacaaaactcagatctcaaagctctgcttgtatttgtgatatttcatttgcttaactgtaaaccatttcaaggtactaacttttaaatctgtatgtaaaatcttttcaaaatacatttttaagctaatactcttaacatagattatgaagttaagtgaaatttatggctctaacagcaaaataattaaagtgccatagtttctcaagtgactaaagtagttattaaaatcaagcacttgatactaatttgaagtgtgtttaaaagtaaatgatttgggaactgacaatgtgtcagaaaatatatgttcatttatcattttaaaatcttgtataatttgccactgtattcatttatgcctaaatctctataacagatgaaaagataattaataaaatcctaattaaaaaatgaga

SEQ ID NO: 1215 - DNA, 6312 bp, Homo sapiens
  SITE (6195): n equals a,t,g, or c
cagttaatgcaattttgaagcatgccctgaatagattcagtcattatcaagtcaaactaaaaacggtgaaaggttgcgactattaccaaataggtatgtatttcaacatagcaatgtgatattttcacaaacatacccaaactgcattttaaaagcttctgctcatctggagtcacagtggaatctgttgggtcctgccctctgggtccagtactcctacatgagccagttgaaaaaaaactgcaggagtaggtggtggtgcgggggtacaatgcactaatactaggtttttgaacttgtgaataggatttgccaagtaacaacatttaaaaaacactatctactattacaaaactattgtgaccacttcaatatagcacatgggtcacaagtaatgcccactgggaaattaatcccctatgtaaacacagtggtttgtttcttgtcttcacaagcaattcttaacatatcaaacaggtagtttaaaaaatatcagtaaatagccttatatagtgaatgacattgtaatgtactaaccaacttcaaaggagaaaaaaaaacagtcaccaagtttaaaacagaatgtaattgtgatttttaattaaaaaaaaaatttttttttgagacagactctcgctctgttgcccaggctagagtacagtggcatgaacacagctcactgcagcctctgtctcccgggttcaagcaattctccagcctcagcctccggagtagctgggactacaggtgcgtgccaccacgccctgctaatttttttttttttttttggtattttttagtagaggcagggtttcgctatgttggccaggctggtctcgaattcctggactccagtgatttgcctgcctcggcctcccaaagtgctgggattacaggcatgaaccactgctcccggccaattttttttttttttatgttctttttttttgagacaaggtcttactccgtcacccaggctggagtacagtggagtgatctaggatcactgcaacctctgcttcccaggctcaagcgatcctcccaccttagcctctcgagtagctgggactataggcgcacgtcaccatacccgctaatttttatactttttgtagagacagggtttcaccatcttgcccaggctggtctagaactcctgaactcaagtgatcctcccacttcagcctcccaaagtgctgggatcacaggcatgaaccatggcgctcagctgtcaatttgtgaatcaataattgtatgctagctgtctaatacatagttctaaatgatggccactattataacataaacaaatgcactggctttgctttatgctctttaaactgaagactaaagcaaaaccagaaatgcttactgacagatttgtccaactattacttattttatttgcagattagagctgaggcaaatggtttcaggatatgtgctttgtgctaacagctttctggagacatcttgattatggctatcgggtctagaagtttaaaaagatatgctctgtgggtagtggcaatcattctgatgaatgatttgtgattctgtaaactctggatttacttccttataataatggacatagcaaataagattaataccctttccaaagaagtaaagctagatggcataacctgttcttaaaattgttaaagtgtatgttaaaggaatcatgtcaaaatactgctgatagaactcaatattaataaagaaaatgctgaccctatgtgataaggagtgagatttggtgaaaagcatcatgggctctaaaagtcagatctgagtcctaacttgggcactgtcatttaagagttgtgtggcctgccgggtgcggtggctcacgcctgtaaccccagcactttaggaggcagaggcgggcggaaaatgaggtcaggagttcaagaccagcctggccaacatagtgaaactccgtctctactaaaaatacaaaaattagctggatgtggtcccagctacttgggaggctgaggcaggagaactgcttgaactcgggaggcggaggttgcagtgagctgagaccatgccattgcactccagcctgggtgacagagtgagactctgtctcaaaaaaaaaaaaaaaaaaaaaaaaagagttgtgtggccaagagtaaagatcataacctcttgaactttctttctttcttcctttttttattttagagacaggttcatgctatgttgccttggctggcaggctggtcttgaactcctggtctcaagtgattctccagcctcagtctcccaaagtgttggggttcccacgcgtgagccactgtacctggccaaccttttgatctttcattacctcttttgtgatacctacctcacagagtattgcaagaattatgtaaaggaagtaatataaatgtgtttaacacagtgtctggtacacagaaagtactaaataaatattagttaatggtttggccatctagcttaagagttcaattctgactgcacattaaaatcccctaaggagcttttaaaggaaaccagtgcctgaaacccattccagaccaattaaatcagaatatctggggaaggagccaagcactggtatctttaaaaaaccctcaagaggattctaatatgcagccaggattgagaaccactgataatcccttctacaaagaacccaattggtggtagtctcaaaaatctccagtggtaagatccttatattgcctcccaagagagatcatttcattagaaaaaaatgatttccttaaaaggaggcaacatctgtctctgcaatttctatcattggttcttgttttgctttgtgaagacacatataacaaagtgaaacccttttctctatggctttgtaaagcattctcatctccagggtaacgtgcctatttccttcaacttgcttctttgacatgatttgagttcttctctccatttggtccatggccttttctaagtgtgctgctgtggatcaaacactgcattccaggtgagaccctaccagcctgggacagaagcagcatagtagtaacaattttcatttcagacatcacgtatctaggaattcaactaaagatgggtttttcgttgccaccacactacgctagtgatagagcaattgcaattgtgtttgttaatgcagctaaagctcttcctgtacttgtacagctgcttttaatatccacatgtagaacttcatatacatttctactaaattccctctttgatttaataatatttattatgctaagcattaggtacagagagccgaacaaaattgacttggttcttaatcctaatggaacttaaattctaacatgagagaagaaaaaaaatccaaaataactactcacaggtgagtttttcacgtcatttcagctacttgagctctcaaaatcacattacttcttgtgcctcaattccctgaacctatgagagctccctacataaccacacaatataggtggttcctctacagacacccttttccttttcctggtaatgcaggttgcattatcagtttcatttttggtagcctgacattctttctagattgccctttccttttagaatcttagatcacaggttgggcatagtggctcacacctgtaattccagcactttgggaggccgaagtgggcagatcacctgaggtcaggagttcgagaccagcctggccaacgtggtgaaaccccatctctactaaaaatacaaaaattagccgggcatggtggcgggcgcctgtaatcccagctactcgggaggctgaggcaggagaatcgcttgaagccagggggcggaggttgcagtgagccgagatcacgccattgcactctagcctgggtgacaagagcaaaactctgtctcaaaaacaaaacaaaacaaacaaacaaacaaaaaccagaatcttagatcacaagaaacatgcctatacctttctataaactttctgaaatttgtcttcctgcagttgagacacatgacagactagactcagtccttccccgctcccttcctttctccctccactttcctgaattctggaaacaggctcttaccagggattacataacttcctcttcaccagccagttcctcttctgtggaatcaatgctccccaactttacaacattttaaatcttaatgttaccctctaccaaaatgctttgtttttaatcaaattatgtgtagagctttaagaaaggctatttttctctgtgtataagatcaaatcagggacttaatttatgtaattcaaatccactttgcatggtagcagtcagggtttgaatgtccactcctccaaaatgtttactaatagggtctctgtcttattcaccttcctttcccacacagtacttagccaagtgtgagatatttactaaaatgagattaatcaaaaggtgtttattaaagctaacttttattaagcagtcactatgtgccaggattaagttcttcttatgcatttttcattttcacaaatgagaaaactaaggcatagaaaagattaagttatttgcccttggtcacaagttagttgggtctgattttgagaaccttgctctgggcatctttatgttaaccctgctaagtggctgctgtagagaaatagggcagtcactctatgagaggaatgtgatgagacctccagaaatgctttctttacttgttatgaccagctctcagactaagctctttacagcagtcaatgggccaataataagtagctttgcaaatattctctgctgccacaaacaagtagaattcaaacactatctcttcgaaggttctagcaagtctcaaattattgaacccagggcacatttaagctttggtcaggttactttcaaaatcttggattgcacatgctgtttcccatctacgttattactctatgcttctaggttaggagtggctaactggcagctgccagctaacttggttttgtttggttacttttttctcctgtccagtgatacaagagtctgtgtaaccttgcaggtgctgtattctcttagtctattatgttaattgcatgccctaagacccctaccttggtcttaggctgaaaagaaatttaggatcctcttctttattcccacttatagaatgagaccaccacaagtcacacgccatgtagcaatacatgtcaaaatgaatgaatgccacatatgagggaaaaagtcaaggcaggaagtggttctgaagctgggcagggccagcagtgggcccagctctcttatggctgtacatacctttagagaaactgatgctcatctttgagaaatatgagctgtcatttctcttcaccaccatctgtattcccataagaacttccctaagagaagatgatctcataaattgagttattttaatataatacatgaaacagaacttcaatgtaggccatggccacaggaaaggttagagcatgaaactccatgagataccacactatgtgctgcttgtttaatgatacaataatgttactacatacagtaggataaaagtaaagtttctcgcaatgtctgaaaataaatcatttattatttacactgtcttttttttttttttttttttaaagagatggggtcttgttctgttgcccaggctggagtgcagtggctcaattatagctcactacagccttgaactcctgggttcaagcaatccttctgctgtagcctcccgagtagctaggaccataggcgtgtgctgggaagcccagcctattatttacacttttagttaaagtaactgttattaaaatagcaaatgactcaatgtttggcattccgttgtaggaaaaatctgaagacataagaactacacatgaggaatatgtcatttagcactttcactttttgatctccacagaagacaatgagaagtcataccataacaatgacgacaacttcagtcagcagctggccttactcctcccacagaatgcgctttataaccaatcatagcgaccaaccgccacaaaacttctcagcaacaccaaatgttactacctgtcccatggatgaaaaattgctatctactgtgttaaccacatcctactctgttattttcatcgtgggactggttgggaacataatcgccctctatgtatttctgggtattcaccgtaaaagaaattccattcaaatttatctacttaacgtagccattgcagacctnctactcatcttctgcctccctttccgaataatgtatcatattaaccaaaaacagtggacactaggtgtgattctgtgcaaggttgtgggaacactgttttatttgaacatttaattt

SEQ ID NO: 1216 - DNA, 6798 bp, Homo sapiens
gcaagctctacgactcgctgctcgccctggacggtaggccccaggccggcggggtgggagatgggaggtgggaacagcaggggagtctggagcaagttttcctcacagtctgctatctgcgctgggctccaacctccagcctccgctctacaattcccccactactgccctgtgcccattgacggtccaggccagcctgctgccctgtgggaggggagggctctagggtctggcggctgtgggtccagattcctgctctgtcactataactttgaactagtcaccaaacctcttcccattgtgatgttctcatctctaaaggggaatactaatacctgtggcactctgaaagactcagttaagacccttcatccacttctccccacagtcagtagacagacacacactgtatgatgcacacctgctccctagtcctgctcccaggcctgtgtgccagcatatgggtgcatgcacatgcatgcaaacacgcatgcacacgcacacacgtgcacatgcatgcacagacaggtgtgtctgcatgcagtccctctccttctggggtgtggagatgagcctgacaggcaccgccgaagttctaactctggggtggaggtgatccacctgcaatctgcccaggagcccccagggacaatctgctccccatgggagctgggagcagagcggccttcaaccagccccattgtgccagttcaggcaggtcagttcaggcaggtcatctagcctcgctgagggacccaggtctcctgagcaccccccagggcccaggatggacccatgcacccgtgaagaggcaagcttccagctgccatgggcagaggggaaagtgactgttgtctgaatggctgctggggaggggttgctgcggggctcaggctgagttgagctgggcctcagatacccccagctcttccacctaccaaacctgaggggaccctggagctgccctcagctgcttgggaggatgggccaagcccaagagggagtccccaggccagaaagcaacagcagagtgaatcatactaccggaaaagcctgcaagggcgagtggagaatggcgttgacagtgaaggggactctcacccccacaccctgtcctcatgcccgggctgtcactcctcactatcctgcacctgccagaaggtggtctgaccccccaggccagctcctgctcaagcccctctcaagctgggctccttccaccgaccccaggcaccgacccaacccccatccccgccagcccgactcagtgtcatcccgcccaccctaggtcacatccaatcagcgcgggccctgatggtggtggccgtgctcctgggcttcgtggccatggtcctcagcgtagttggcatgaagtgtacgcgggtgggagacagcaaccccattgccaagggccgtgttgccatcgccgggggagccctcttcatcctggcaggtgagtgcccctcactcctgcacaatcacaaccatggcaggcagccccagccccagtggctcggggggccagagcagagctgagcgcccctctgctttgtctttaggcctctgcactttgactgctgtctcgtggtatgccaccctggtgacccaggagttcttcaacccaagcacacctgtcaatgccaggtgggtgccagggcttgggtcttttgctttacctcctctggggccactgacctttgtccactggatcacctggcgggggaagtggggacaggatccagctgctgtccaagaagctttaaaggggggcgccaggaggagtgtggtggggccctccataggggcgggaggcctgtgatgggcacccaggtgcagcaaggactctctaaggacctaagtgccctggctctgggtttcaatcccagctctggctgggtgcagtggctcacgcctgtaatcccagcactttgggaagccaagatgggtggatcacctgaggtcaggagttcaagaccagcctggccaacatggtgaaaccccgtctctattaaaaatacaaaaaatatctgggcatggtggcgggcgcctgtaatctcagctactcgggaggcagaggcaggagaatagcttgaacccgggaggcaaaagttgcaatgagccgagattgcgccactgcactccagtctgggtgacagagtgagattttgtctcaaaaaaatcaaacgatcaatcaatcccagctttgcatgcactgtgtcacctgggcaagttacttaatctttctgtgcctagtttcctcctctgtgaaatggagctagaacctgagcaccagttcacacatggttgtcaggatccagcaggatgcaggtgagggtgtggcaccgtgcccgggccctggacagtacccagcaagcctgagctgttttcatttctgctggtggcagcagggctgagatgacttcctgcaggaggcagcagttattctgggccaggaagaaacttgagaataagggcagatcgtggagggccttgcaaccacaggaagattttgttcctcatttgggtggaggcagcggcagtccttctggctgtgatgtgcagaatggtggggagggagtgacaccaggaaggcggctgtcccaaaggtctgagcagagagtttggggcaacagggagggagcagtggaaagcaggctgatattcaggagataaccaggacttgtaagactgtgggcatgggaactgaaggggatgctctgcaaagggcctgggcccaccttggctcctccctcacttctcagcctagccaggagcagagaatgggacagtcttaaccctagacatcccaatgggctttgggccttggggtggagagaggatgagaaaagatgtctgggcttttgcaatcgggagggatgcctggaggaggcagaggtgttgagaggcaaggggagggaggagatctcaggtacaaggtttgttccctgggtggtggctgcagccacaaagtctgccaagcaaggtccagctcaggcatgtcaggataggactcggcccccgatcccttcaacagtccccaatgccacttgggctgccaggccctgtgctgggtcctggggacactgatggctctgtctgccctcaaggggcttcccagggagccggacaagcaaggggctgaggcctcctggagaaagcatggtagtggagtcggcgcaaggggcggggtgaacacagaggatgtcaaggaaagaccccacgaagaggtggcatctgaactgggctctgaaggcagagaaggaacaggggaggcacaggagtggtgggctggggggcttggtgccccagctgggggtgccttgtgcaaaggcaccaaggcagtgagaaccaggagcagggctggcctggccagcagggtctgggtgtggagagcccagagtgccaggtggaagggtctggccttctccagagggcagcgggagcagtcttggctgggagttctgtgggccagaatgtgactgggaaaaaacatggcagggattgccccactcctcccgtgcagacctctcaggccctcccatgccccctccactggccagatcaggaaatgagcccaaggttgctcagagcaggagctggaggcccagcctctagccttcacgcctaccccaggccgggtcaccctgtgtggtgttgatattctgggctgggggggagggagaaaggaagagcattcacctcaatttatctggagatatggaagaggttgtgaggctccagcctccagctccacacactctgcccttcctctgccagggcagggactgggaacaacctgagacggcagccacacctgatgccactctccctaccccttgcaggtatgaatttggcccagccctgttcgtgggctgggcctcagctggcctggccgtgctgggcggctccttcctctgctgcacatgcccggagccagagagacccaacagcagcccacagccctatcggcctggaccctctgctgctgcccgagagtacgtctgagctccgcctgccctggccagccccccacccagtggcccccttgcccagcatccagccagcctcgcagcaccctgggcagggccactggggcataggatgggcataggtgctctgagcagcttgtcctcaacacaagcacccaccctgcaatctgagacccagatcctcagagagacaccagaggcaggacccagcccccaggcatacacacagatgcaggtccaggcacggtcttgtctgcacagcctggtgggcaccagcatgcatccctggagacaggccctcaggcaccagcccggctgtttactcactgaagagctgcttgggtgtctgctacgtgctgggccctagagatagagcagtggccaagacgtaccttagtacccaggtccttggggtgagcagaaaccttcaccctccccagtcccatgggctcctcacagcaaccccacaagggcagtgccgggatgctgaacgttcacacaaggacagggagggtctgagtttaggtctcaggttcttccagtgcgcccagggctgggggccacctacacagatggtgaggtcggaccatggcgcccctgcccccgggaatgggccccaggcagggctgctgtgagggccaaggtctggccacgctggccagtacccatgtccgggcctgaatgcacagcccctgcccccgaccccacagctcactccactaaccagctctctctcttttgactttcagaccagttgttaaattgcccgcctccgccaagggccccctgggtgtgtaatgtccagtccccagccaggctctgtcccctgccatacctagactgtgtgtttcatatttttttggaaagagaagtgaacatccagccccaatcatggtatcattcggtctgtcctcagcgtggcttggacggggcctgtgtcagagtggtcagtgctgacccctggggctcttgggcagaaagatgaggagacagaggtccagggtgggttacatagcacatccagggctaagcaagaaataattcagaggtcctaccctctgtctagggacccccctcccaagcctggccttggccttggcacaaagtcctccttgataggagatcccactcactcctggaggctgcccctgaggcttggcccagctctaggagcagtccccagggtcagggagcccctggtgtggaaagaggccccaaggtagtaaaccctgcccctgttactgtgctccagagacctcctaagggaagggacagttcctggaaggccctccagctggatgctggggatcagcgataggtgaggggacacagtgtaggagctccccatgtagaaaagggaatgtggggagggcgttaggagcttgcaggcattaggactgtcctgagcaaggtctgcagcccccagctctgctcaccccgaatcctgccccttgtttccacacctaccattcctcctctcctgatccccagcatccagctgaggtccaaggtctttgtcctagaatcagagtggggaggggacagcctggggctgcccagagactgtgggtggagctgcctgctgcactcagcagtgcggtcagagaagggcttttggtcttgaagtccaggtaccatccccccttagcatacagggggaagggcctgagaggaatgtaaggaaaccagcccagatcagtcccaaggccagagtcctttgtcctacatctccctgaaccagagtgtgccctgcccctcatgctcagacctctcccaccccaaaccctctcccgggactcagtctccctggccactgcgtatcaggcttctggggaaagcatccatcacagaacctccccttccctgccacgcaccttccttggccagctccattctggcctcctccaccacctgccttgtgaccacatctcccaccacgtccccagatctcaagaacgcagctcagcttctccttcgagcttgactctgagagggaaagtgacggaaaccaagtcagatgagatgactgccatgtacactgcagtcaagggcagggaggggaggaatgacacaaatggcagggagctgctgggggactgacccctcggcgcctggcctggccggtgctgcacatccaccggggcacaacagggacttgtccagcctctggtcagaggatgtggccacctgaccctaaataggttccccagagtcctgcccctctaatgaatgagaactgcaggagtttctcctctgggtgcctgaagctatagtgcaatggttcccaaccctgcatgcacattcgaatcacctgggggcacaatgcctaggctccaaccccagacactcttatttcattggtctgggtggacctggcatcagaagtcatgtagctcctcaggggactgtagtgtgtggtcagcactgagggctcctctatgaggcctcaagcccaggtgactctgtgaggtctgcagagggagaaaagaacccacaagggaagaggtggaggtcaggcacggtggctcacgcttgtaatcccagcactttgggaggccgaggtgggtagatacctgaagtcaggagttcgagactagcctggccaatatggtaaaaccccgtgtctattaaaaatacaaaaattagctggctgtggtggtgggcacctgtaatcccagctactcgggaggctgaggcaggagaatcgcttgaactcgggaggtggaggttgcagtcagccaagatcgtgccactgcacaccatcctggatgacagagcaagactccatcacaaaaaaaaaaaaaaaaaa

SEQ ID NO: 1217 - DNA, 31169 bp, Homo sapiens
  SITE (4244): n equals a,t,g, or c
gccgcggcgagagcgcgcccagccccgccgcgatgcccgcgcgcccaggacgcctcctcccgctgctggcccggccggcggccctgactgcgctgctgctgctgctgctgggccatggcggcggcgggcgctggggcgcccgggcccaggaggcggcggcggcggcggcggacgggccccccgcggcagacggcgaggacggacaggacccgcacagcaagcacctgtacacggccgacatgttcacgcacgggatccagagcgccgcgcacttcgtcatgttcttcgcgccctggtaacgccgcgcaggccggcgccctgccccgcacttggcgcttcgcggggcgtggggcgcttgggcgccgcgggcggggggtcccggggccacgtggacgccgacggctctggtctgcggcgtgcgtgctacgggcgcggggctcggggctcaggggtgcggggtgtaatactgggggcgcggggccgggagcgcggggactctgcgggttcggggctccggctggcggggagcggggggcgcgggcgccgcggctcggggccgggagccggggactgcaggggaccgagggcttggggctccgggtcggggggcgtgagctcagcgggccgggcactggcggctgacgtggcgctcggcggccggggcggtgcgggaggagggggcggaccccgaggggacagccgggaaaagcccgccctgcgccgcgctcctgaattcaaccgcctcttgcacctcggcaccgagggaggggaaggtggggtcgtcgccctttcgggcagccgggagtccaaatgtcaccccgcggtccctgcccagcgccccaaacttcctgtgccggccggacgcgcggcctgcccgtgggccacgtgcactcaccagagcggccttgctgctgccgcggccaccggggtcggctgggacagactgcgggcacgtccccttccagaggctttaactgaaaaatagaacccaggaaggtgtggtttcccactttgtgcgtcttttgtgggataggaaggagtggtccgggcagaggagggttgctgagctaccccgggaagaccaaggtagtgcgaattctggaacccctccgcccccctgcagctcagggtggatgtaatctctgaacggagcccactggtcctcaactccaggctgtcctgtcacctccctgctgctctctcgggtccaggtcacttgttatgtgtgagatcggaaaagcccctccgttgagcagatggtccctcttgctttggttctctgggcgaggctttggtgtgggcctcgctgctgacctgagagaccctaccctggcactcatcccacggaagagcttcctgtcattcacacaagcatgtgcacagctttcctgccagtgccgggatgccccgaggaagggaagtgaccacaggccagagcagaaagccataattttaggacacaagacctttgagaggttggaatagcctgcaggttcttgttgcagaacttggtattcttccccagagctcagtagaggctcacttgggaaagggatgtagggaggcatagagaaaaggtaccctaagaaaaatggccagttcagaaattgtacctttcaaactgggagaaacgtttttctcttaaccttgtattcaggctattactgcgtttcagttcatttggagttaaatcaactttttgggccagtgtgggtttattaacaatgtgtatatgaagtacattatgtttcacattcctaagaaccaactgactcgaatttttacaactccaatggtttagaaattactttgtaacataaaacaatcaggcagtattaacagtttctctttgttcgggagtattctcagcaactatttcaattaagtgtactacttaattggagcctatttcagtggaatacatctgtcgatgggttttcttttttctttcttcattatttatttattttagagatgggatcttgctctgttacccagcctgaaaccagtggtacgcagccgcagctcactgtagcctctaactcctgggctcaagtgattctcctgcctcagcctctgaagtagctgtgactacaggcgcaggtcatcacacccagcttattttgttgttgttgtttttgttgtagttggtagaaacagggtctcgctatgttgccggggctggtctcaaactcctggcctcaatcagtacttctgccctggcctcccaaagtactgagattacaggcatgagccatcgcatcccattctttacttttttttttttttaaagaaaaactgacatgcagatgtaataagtccccacagtgccaaaggaattttaagtttagaatctttgcaataaataccagctagtcctgggctgagtgagagaaaactggcacatctgggcacttggtattaagtaaattccttttccattatatgtggcttgtagacatttagctggatgcttccagaataattagctttatgttgttacttttttttttttttttttttttgagatggagtcttgctctgttgccaggctggagtgcagtagcgcgatcttgatttactgcaacctccacctcctgggtttaagcgattctcctgcctcagcctcctgagaagctgggactacaggtgcgtgccaccacgcccagctaatttttgtatttttagtagagatggggtttcaccatgttggccaggattgtctcgatctcttgacctcgtgttctgcccgcctcttcctcccaaagtgctgggattacaggcgtaagccaccgcacctggcatatttgttgacttcttgatagtctactacaaatacttaaacagagatatgtgggtttctatgatggtgtttaagttggacttttaagagggccctttcagaaaactgcagatactgcagtagggctcaggaataggctgccaggaaaggaggctgagtgggcggcgagtcaaatgggaggtcagcaggggcaagatcaagtaggaccaacaatacctggcacaacactttggtaagttgtaaggctgagagcaaggtggtgactctggaggggtctatgcaggagagggaaggaggtcctggagtggtgagctgagcgtttggagctcagatagaagactcagtggactccccctcaacacacacatacctttttccagtttcagctgccgtggagtggtgaaagcccacgtgtgattaaggggctggggcccctgtaacaaaaacatcaatctgtgtatttttgccctgcacttggcttctgcagggttatcctgctgctgtagattttttgccaacatcaggtcacaacttctgtatggccagtttgtgagtcacccttgacctggtgacagtgaggtcaagatttggaccaggtagctttgctctacttcttggccacaggctaccttctgagtgcagctgcctgtctcagagttgggtgctgtagccgcagggccgactagatagcacctgtggccccatcacagccaggagcaagggcacgcccaacttggtgatggcccagaatggtcagttttgatttagcgcaccacaaacttatttattgtttattctcattcttaatctaatcttgtgttttctcaaaaaaaaaaaagggaaaaaaaaagcagtagcaaaacaaaaccttgtcaagattgcagaggagttctaaagttccagaatgagcatatctgatcaaagtcccctgaaggtcagaactgcccttgacagtcccttaggaaggtgccttgttggacaccgccccagtcagtcagtcagtccccactgccagcgtttcctccagcattagaactatcatggcttctttggttaaacaccaaatggactagttctcaaacctgtgcctttagacaacagggtcacacttaatgtagtcggagagatgctcatgccatgagaagcatgtaggaaccaaggcctgctgaggaacaaaaacctcacatctcccagcttgcacacacttcagggttctgtgggaattgcctttttttttttcttgtttccttctcccccgccacataaactcactttgttgaatctacagaagttaaatctgcatgtatagtttcattgtgcttttttttttgtatctgagtatctcataaagcagggattctcttagctggccaagaaagtgctgtttagggaagacacattaacttgaagcagactttttcagtgctacctttaagtctgngtttttttttttttttttttttttttttgaaatggagtcttgctctatcgcccaggctggagtggcaatagcatggtctgggttcactgcaacctccgcctcccgggttcaagcgattttcctgcctcagcctcctgagtagctgaaatacagggcgtgtgccaccatgccccagctaatttttgtatttttagtagagatggggcttcaccttgttggtcaggctggtctcgaactcctgaccttgtgatccgcttgcttcggcttcccaaagtgctgggattataggtgtgagccaccacacccggcttaaatcctttttttcttaagagacaaaatctctgtcacccaggctggagtgcagtggtgtgatcatagctcgctgcagcctcaaacttctggcctcaagtgatccctctgcctcagcctcccaggtagctaggactgcaggtgtgtgccaccacaccaggctaattttttaaaattttttgtagatgggggtctcactgtgttgcccaggccagtcttgaacccctgggctcaagcagctctcctgccttggcctcccaaagtgctgggattacaggcatgagccactgctaccgacttaaatgcttatttttgaggtaatctgtcagaaaataaaaggagatttaacagattattaaattattttgaggaagaagtcacaattctaagcgttgagtgttcatataagcaagtgtgtttaaaaaaaaagcattttaaaaagcgatacagcaaagtggttacattgtaggcatcagtgtgttcctgccatattaaatagcaaacaaacccatgtgtcataatgctatgggattgtagttgaaacctgggataaagtttctagggttgtctcattcaaaattcgagtatggcactgtagacatactgtccagagaacacagcaagagctgtggtcagctgtatgacttaaggtctagtgttgggaaagatgctgatatcctcatgaaatgtgaagcatggcaagaagcctaattaagatactattttaaatgatgggtgattttaaaatatttatacataactgaattcatacaatgaatactaagaatagacatttgcttacttcaaccctagaagtataggtggccacaaactttttttttccccttctcattggagaaaattgcaggtgattaaattttgagattgccttatgtttgtagccatttggttatatagtggaggagacttgacgaataaaagtagcagatacagcaggaagtgctaagctactgtccaagggaggagtagagaggctttccagaagggcaggagaagagaatgggtgctgaacagcccggggagtcagggccaacttgctagaggaagtgacacccaaactaaacctgaagggcagatagatttagctaggtggagtttagggacgaagtgtcagagagaatgtgtcccagggccaagccaagctatagtcctttgggaacactgcagatgctgcagtagggctcaggagtaggccacaagggaaggagggtggactctgggatagaagtcaagcgggaggtcagcagggccagaacaactaggatccagaacaacactttgctaagtttaatactggaacaaggccaagatttcatgctgagaacagggcagtgactctggagggatgggagcaggggagagaggtcctggagtactggtccaggagctgccatctgcaatggtgtaaagaaaggactgagagccccattgtcccctggacagagctgaagttgtgggccagctgccctgtgacctgatactcaatgtgcttgtactcttgccttgttccaggtgtggacactgccagcggctgcagccgacttggaatgacctgggagacaaatacaacagcatggaagatgccaaagtctatgtggctaaagtggactgcacggcccactccgacgtgtgctccgcccagggggtgcgaggataccccacgtaagttggaaggaagggggcacacttcctaggtggctcctggctacaaagaaagtcctagttaaacttttggtaaaggtgtgaagagatactaaatttaagcaggcagtccctgtcattagggagaaactgcatttaatgctgtgtctgttttagatggcttttatacttggataacctttaattcatcagtgttgggttttcctgtttataagagaatgtgtttgcaagagaaaaatgacggtcccgccatgctagatgttcaccggtacattttacacagtgtgcatggactgtcatcagttttggcttgcttttgctggtgacttattcgcaaacacccttcctatagttccttcccgtgtgactcccacagggctgttcctgttggaaagaaagtatagagtctgacagacgatgatacttacttccttgacagttaagaatttttttggttataagaaatagaaattgaaatgttctcaattctagaaatagaattgttctcttattaaacagaaagaaaggactatttaaaaggctgtggaggaacctctgagagccagctccaggggcctggggtctgtttctcctgcacctcccttgagatgacggctttccaggcctgtatctctgtttgcacagaagggcccaccactgactggccctgcttggctggaatgttcgttccaggaatagtcactgtggccagggaaacaggagcttatagcaagacacatgcccattcacaccatgtgccaagtgttggagggaaaagcagttcttcaaaaaagagaagaagctgtttctgaaggaggtggagggattgccacggtcacttccttgctgtttgtttcaattgaggaatgaagtcaattctatacaatttattgcttaattgaataatataggggtccatcaataaagcaaaaaattggagcttatattcaaacctgggaggcagaaaagtggagggatctccaggcttgaacctagaagtcgtagtcaaatcccagctctaccatttacttaccacccagctctgacctcatcacttaacctgtaagtaaggtgatcccccaaacattgttacaggacttacatggaatgtgtgcagacaccaatctgagcacacccaatacatgttagggttttccctaccatttggaaatgtgggtgtttccacaaaggaccctggaattcttggtctttggtgactgcttgctaatgtaagtgccataatttgggtttactttaaatcagatcaatggagataaaattgcttatctgtatctacgtaaaagcattaactattctatgctttatagtattgcattgaaagtatggatcaagagcatcccaaagaagcaggtagtgagcagagatgagggcgaggaggtgaatgcttacctgttgagagactgttgctttcaaagttcaggggcagcaggggtgagctggctgtggtgtctttcctcttaacctgctgaccatctgtggcctgagactatgtgcatcacacaccatgccacagggaaggtgacacaggacctgtaatggagctgagagtggtatgtgttatggggcttcagagaaggaagtgaaggcttccacctcagcctggccataacagctgtcagctgcaatatcagctactccatagttggtattcaccaaaaaccatcacagatttaaaaagtcacaaatgtaaaaagtcacaaatttaaaaaggcccatgttggatcatgtgtttagatttttaatgagaagagctggtctccccaagtaaaccatggctggttttgtgttattaaaaagaacaaaaatgaacgtacaccacactgaacacagtttgggaaggaacctctgtgaccatcactgccctgcagaagctccaagaacagattattttccccccgagaatgcaggaggtggaatgtgctgtgtgcaatgtggtcgcactggggcatctgtagattgacttgagcgagctttgactcctctaagacaagtgcccatcccatagagtggttgtgaggcccgaggcaggtgacgactgtacctgcctgagtccaggcatgtgtcaggacatgagctttcacgttattctttcctggcaagtgtaactggagtaaaggattggaggggcagggagtttgggctcccacgctccctagagatggctggctgtgctcaggaaaatgttttgaggtcttcctgttgggccagtcatgaatcattacagcagggcaggactgacggggggaactacctgtgttagtttcctaggctgctgtaacaaagttccacaaaccgggtggccagaaacaatagaaatgtattctctgcagtcctggaggccagaggtcctaaatcaaggagccagcagggtcatgctccctctgaaacctgtaggggaatcctcccttgcctcgtcctggctcctgttggtttcctggtcatctttggcgttccttggcttgtagatgcatcactgccgtcctctgtcctcacatgcccttctctctctgtgtgtgtgtgtctctctgtgtccaaacccttcttacaaggacaccagtcatgctagattggggcccatcctagtgacctcattttaacttgaatatatctgtaaagaccttattctaaataaggtcaccttctgagattgatggttatgacttacacagatctgtcttgcaggacacagttcaactgataacactgtctacggtagtagaactttcatcatgctgtttgccaaggcagtacctacatggggattttctccctgcagtctccttgaaaaaggagactcaaatgcccatgtggaggcttggtaatagcggaaatctggggcaatactttgtttgggcttgtaccctgtggcccagtctccatcacctccctcacccctgtcgacagtgagaattgaagtcagatgtcccaaactcactgcaaggtctggaccagaagtgtccgctctgtccctgggctctgtgaacttaccgaggaagaatctcagacttcctgggcaggttagaacgattatcagtccaacaacaagaagatggttttttttaaattatttgttttgcaaatgaatagcaaattacaaaaaaatcataggctaggtcttactgtattttacttttagcaaagacacaagtgtgaccgtccctggtcctttctgatgtcttgaggatccacccatttcccttcctgaagagcgttagcgggaggcagagccgtgcaggaagcagtttctgtttccaggtgcggaacacaccttgtgggagcctggggaggtgccaggctaggtgagggcaatcatctttgataccgcagatgttgcagttgcttatcatgttgaacttcgtgacgtagccggtgtactggccaaatctagttaagttttggctgttttttgtggttatgagagtctgagctgctgaggaagctgggtgtatattctgcactggagacacattagggaccctacctatgccccatcataccatcttaggttctgggtaaggccagtatgctgatactaatttcaaagcctaatctagccatgtgacttcattttaaggagaattagccatttttttttggactgaatgtgtgtgtaccccagcattcataggggaaatcctaatccccaatgctggcaataggaggtggggcctttgagagggagcaggttattagggtggagctctcatgaatagggttgcataccttatgaaagaggccccagagagttctgtttccccttttgccatgtgagggcacagcaagaagacaccatctgtgaaccagaaagccctcaccagacactgactctgctggcaccttgatctcagacttcccagtctctagagctaggcgaaatagattctgttgtttctaagacacccaatctgtggtcttctgttacagccgttgaactaagacactattcaaaccttcatgtcagattttacatatgttgccgtcttacaattctgataccgtacattgggcatttactcacaaaatccacatacgcgctgtagaagtggcaggggtgtttagatgagcaggcttgccaacaaatggtactctgtatttcttttttcttctattggtagtcacatttttgcctatccttgacaccttctatgaatttttatctagagtattagagcacgttttcccgtgactgctggagggatacaggaactgagtgttaatttcatcctctggtgatgtcttttgcttatggttaaaggacctactcccgtatcctctctgcagattccttcagaggccagcatttgtaggaaaaagaaaagattccttctctatgggaaggtgaatggacagcatcagtcaatgtcaaggatgttcttatagctggaaacttgaattctcacagtaactggatattcaggccttgtaagagttgaatacctgccaggtggcctggaagaataccttaattgcaaaacaacaccgtgtctgctccagtcctaatttgaacacagacacaacaactgctgaagccgggaaagcataacagtagcttgcagggaaggcccgaggctgctgcagaggagcactgagtactgtagcttttgaggcctcagtcacagcagcgggctggaagttttcacctcattttagttttccttgaataaaaccagaaacttctgaaagtttaggattaactgaatgtattatctcctggaacgttatgtttgtttcctttttatcagagaggagcagatacgtgcctggctgcagccccttgacagctcattttctgattgtttcactaaatgagtttgctctctgataagacaactttctttttgctctgtctaatcctttgttattctttcagcttaaagcttttcaagccaggccaagaagctgtgaagtaccagggtcctcgggacttccagacactggaaaactggatgctgcagacactgaacgaggagccagtggtgagtgtctacctccttccctccctccctccctccctccctctctccctgcctacatctttggggtaatatgtaacggggcagaggccagttgaggttaatgattaaggctgccattttaaagcaactctactttttttggagcttattgatattataggtaaagatgaacttttacagaaactttttggtgtggaaatacctaaatgtgcacaaaagtcaagagaaggctaaaccctcagtttcagcagttaccaccattttggtgtttgtcttccccgccaccctgcgccttgtttggctgtagtcagtcttcagggaagtcacttgtgtggcctcacagataagcacttactctttgttaacactgccaccctgccactgtcacaggtaatacagttcacaactgtaccctagcatcagagactgactctggaccacctggggtcagggctgggcccagcctagaatctcctatccaagccagcactggagcctcctcccatccccccgacctttgccctccaccacctgcagccctctggctcgggcctagcccgacagctgtacccgtagggtggatccttccttttcttctcggtgctcagtccccgagtctctaatgggctttgcttataacatcattttgtaccattaatactctgtgtcttaatgcacttcccttactaaggctaatatcaggagattgtagactcttagaatattatgtactaaaaaggatttataatcctccccctccccagttgatgttggaagtcttcacttttttataaatcatgatcataaaccactggttaagtgttcctttgtgggtggtgccttctgattaatgccgagtgctcaggtccctggatgccgggtagacctggtgggtcatgctgctgtgttggagagggactggaaaaacacccgtgttcctacactgtaggatcctgatgagctaggaagagcatctgaagtctttgtaatttcaatttcaacaaatacctaagactaccttcttgtatcagctaagcgcccactgatttgaaggtggtctgtggtggtccttttggagctttgccgcttactgttgccagtttccagtgtgtctgtgcggctcttccgctctgccccatcttctctgatgacctaatcagaaacttggctgctgattcagtgcttccatccctcacctgcaaagactctctcaactcggctgggtgtggtggctcatgcctgtaatcctagcactttgggaggctgaggcgggtggttcacccaaggtcaagagttcaagaccagcctggccaacatggtgaaacgtcgtctctgctaaaaatacaaaaattagccaggtggtaggtgcctgtaatcccagctacttgggaggctgaggcaggagaatcacttgaacccaggaggcagaggttgcagtgaggcgagatcatgccactgcactccagcctatgcaacagagcaaaaactatcgtggaaaaaaaaaaaaaactctctgaactgtatggtggagactgttggtgtgtgatgttatgtcgttgaaccagagacttacctaactttagctaaaagaaccacagacctctcaggaaatttgcatctttgtcctggcaagaaagctgaatgagcaggtgtgactttcatagttttcaattggacattgtttcctttgtgaaaatattctctttgtggggacacatatattggatggtagcaaaccaattttaaggaggagttaatagcctcaaataaatttcaccaaaaaagccagtcttctatgatggctttattcaagaaaccagcagccagtatcaggacggcagaaagacctcatctcatggcccatttcccttagtggaggtggcggcctcacctgcaggttggaaagggctgagaggctgcgtccaggctctgcaagggactttctgtctcctcagtgtgggagcaggatggccgcgtgtaatccccccatgccaccccagaaccacagtcaccaacttgccatattttagtgtctccagcaatagcaggccccagataattgccagaaacaatgacaatgcgccttattgtggaaaagtttaagtatatacactttatactgcaaaccagaattctcttagctttttaagtgaaaactttaaaaaaagttctttatctgtatacctaagtaacttagtacatacattttttaatattcacgtgggataaatttagatttttttaagtgttgtggcaatattcaagaaactcaaaagacaatttgtcactttgtacattctactgcaatttttgtatttccatgtttgcttctgtattttttcttgaacagttatacaaacatgtttcatctcattaatgattttatatatttatgtggtctttatattgatcatgtcttatattattttatcatgtggatttgccataattcaactctaattctgtcagtggatatttaggttatttataccttttccatcatcagtaatgatgtagggaacaagtttatctttgtaaaggactttccacccccccttcttttgagtgatatttttagaatatagtattcccagacataaaattataaggccaagaataaaaaaaaagatcatttttatggctcttgatgaatatagccaggtttcttaagcaccatatcagcttatgctgccactgtagggcaagacgtgacctgtttctgggatgcactgtggtgttcccgtgccgggggactgctctggagtctgccaggaacccaggaagcaactagaggccccgcatgtgccataaatgaacacttcatactgaaaggcccttgaacatctcatggagagtggcacacggtattttatttcaccttatgtgcacccattgactgttcacttagccattcttcccttgggcattgttttgtgtgggtatttagcactttgaaagtcttgacgcgctggcagcagaagggaaactttgtggttctttatgattccagccctgcacagctttgaactgtcagcacctttaaagcctttaacaacttagcttggatattctttttaataggaatatgaacccccagataaaagctgagtaatatacacttaatgtgtctgcagcagaacactgattccattatctttccctcatttctggttactttggttggaagccacagctgtacctggtctgaaaagttgagaaatgtaggattgtgactagacagctgcacacattgctgtctgcttgggtcctggcagaagcatcttttgaaaagcccctttccccctctttctgtacgagacttagtcatatgaattacattctttcttgaaggtgcagcttatgttcatgccatggttttctctctgttgcctttcattcacctgcattttccttctcatcacctccttttctctctgatcagtcttccacagttgtgtcttcctcacagttttccctgtcatttgtgtaaagtaaggataaccaggccttcctggtccctgagtttctcattctcagctttgtccattttgctaccctcgtgtctgtttgtgtgttttttgaggaagagtctcactctgttgcccaggcaggagtgcagtggcatgttctcagctcactgcagcctccaccccctgggatcaagtgatcctcccacctcagcctcccaagtagctgggaccacaggcgcacgtcaccatgctcaggtaaataaaattttttttttgtagcgatggggtctcactctgttgcctaggctggtcttgaactgctgggctcaagcagtcctcttgcctcagcctcccaaaatgctaggctgtcacctaggctggtcttgaactgctgggctcaagcagtcctcttgcctcagcctcccaaaatgctagggttacaggcacgagccactgcgctgggcactctggtgtctgcaagtgctgaccccttcagaatacgtccattgggcgttgtattttgtattctttgtgaagtatccaagtacgtttcaaagaagaggacagggtatagggtaagactgtcctttgcattgtctgctttgtttggttgggttttggggtagggacagctatcacttggctgccctggagactcagacctagagctttcactgagggtgaggctgacgagggggctttttgctgaagcttccagagggcttgacgagatcagttcctgacctggcctcactcagcacagcagcatcgtacaagggttcccaggttgttgggtgagggaggcatctgcaggcggttccccacagacacagtcacctcctggatggtttccctgtgtctccactgacacacccatgactgttttatttcctcctgttagacaccagagccggaagtggaaccgcccagtgcccccgagctcaagcaagggctgtatgagctctcagcaagcaactttgagctgcacgttgcacaaggtaagggggacgtcctgatgccagcttcagagaatcactattattccttggcgtgctgggcttttccttcctgctactcaagggctcttagatagcagcatcagtggcactgacaaagggtcactctagaggagctgttgggaccgttgttcagtgcacctcctctaaaacatgagttctccttttgtctgtgcccttatagaaacgccgagtctaatgctaagcacacgtgacccgcacactagctggacagtgcatccttggctaagagtgtttattgacagactcacctcgcttgattgctctttactttattgcactttggagatactgcatttttttacggattgaggattttggcagcccagcatctggcaggtctagcggtttttccagcagcttgtgcttactttgtatccctctgtcagcatctttttagcaataaaatattttttaattaaggtacattgtttttaaagaagtaatgctgtagcacatttcatagactatagtgtaaacataactttgatattcactagggaacaaaaaaatttgtgtgacttgttttattgtgatattatctttattgcagtggtctggaaccaaacccacagtatctcggaagtatgcctgtgtattaatgataatcatatgcttaatgacctcaggcagaaacaaaagcttctctctgtctaaacagaatttagattgggcacagtggctcatgcctatcatcccagcacttggggagaacaaggtgggatgactacttgagcccaggagttcgagatcagcctaagcaagaccttgtctctacagaagattaaaaaaaaaaaaaaggctgggtatggtaagcgcactcctgaagctgaggtgggaagatcacttgagcctggaaggtcaaggctgcagtgagctgtgatcatgccactgtactccagcctgggtgacagagtgagatcctgtctcagaaaacaaccaaacaaaacccagaatttaatgacaccgttataacatgaatcaaattagttactctttacacttaaaagatctttctataccacatcccattttttgcaaatggtctcctaatatcagaatgatccccataaaatttccagtgtgaatacataagtctccctttattcacacatagatgtgtttcagaaaacttggcccaacaccgaatgacttgaaagcaattttggcttcctggccggctcccattaccaaatgctaccatggagagaaatccccttagaagactgggttggaaacgtgagaaatggcttggattgcctctggccttgtgacttgtgcctgctgggagtcagagcccctcccccaccacacttactgtccacagtaacttatcgtgaggccttcagccttttcccacttttgctaaaagttatttcatccataccagcgccctgacggcagaactctagcatgctttccgctacgggaatgcattttcagctgggattgtcttgggctctgagcagggtgtgtttcccaaatcacctgttacggaccgactccggcaggacagaccgactccggcaggcctagccagcgcctccctaagtgggtcactgccacacagctgtgtcgtgtaggtaccatggtggcttcctgcccttgctggcttcccatcagtactctgattaggttcccagagagcctgtctccaccttacagtgcaggatctactgtgcacctgcacatggtttcagctttgcacattttttaatggaagttgttaacttttaaaggaagtttttcaccattttcttcaagtgcattgttgctgtgctgatgagacagtagctgtgagccttagtgtggcagagtcctgctcagacgccaggccacatgccactggttagttctctccccggccacagcctgctttcagtttggtatcagcccaatgtcagggtagaacagctaaacaccttctgtgtccaaataatgatgctgtgagggtttgtttgtttttttccccgtagccaagggggtgatgtttcattttttaaactttttttcatgataaaatataatacagatcgagaaaacaaatgtagggcttaatgaatttttatagcgtggtcacactgtaactactgtccagttcaagaaataaaactgccagcttcccgtgtcccatgcagggcacagcccgccctcccttctccaagaaggcacttgcctgacatttgtggaaaccacttgtattagtccgttttcactgctgatgaatacacacccgagactgggcaatttacaaaggaaagaggtttaatggagaactcacagtttccacgtggctggcgaagccttcccaatcatggggaaggcaaggaggagcaagtcacatcttatatggatatcagcaggcaaaaagagtttgtgtagggaaactcccgtttttaaacccatcagatctcatgagacttattcactatcaccagcccagcatgggaaagacctgtccccgtgatccagttgcctcttacctggtcctccccacgacatgtggggaattcaagatgagatttgggtggggacacagccaaaccatatcaactcctttatgtgcactgaagtgcacattcctgagcactatagttctatatgtgtatgtgtttatatatcttttaaggctcttttaacctgcatgttctccagacatctctttatctttcttgctgaagacataggtggtttgacctgtagagctccccgtggtccagactttgctaattgtgtccccgtagtgtggtctacatgtttccctgatttctctgtttcctggaaattggtagttgggtctggggacaaaatcagtttcagtgtgatgttttttgggggcacaagaagacctcatagctggtgggggcacagaacgtccagttgtctctctttgggatgtggtcgaccatgacaggcagagcctgggtccgtccattccttagggctgccaagtgccgaggctcattcaagcgtcccttcattttttaaccaagagaaactcaccctcatttatcacctggttattcagcggtacagtgcatataggagaggtgggagaaatgcctgattctttccttttattacagttttccaaataatgagttgattgctgattgtccatcaaagatgacaaatttggttttgagtattgttatgaactcatgaacagaaacacatttgatggagtccctttgtaccaattaaagtgctcatgccgaactaagatttgctaagcaggacaaagatctgattcttcaattaactctctagtgaggtctgacataaattacagttcctctttcccccgtctctgccttggctctccactccaggcgaccactttatcaagttcttcgctccgtggtgtggtcactgcaaagccctggctccaacctgggagcagctggctctgggccttgaacattccgaaactgtcaagattggcaaggtgagtgaaagcccttattaaactggaaatggactgctttgggctggattaattagcagagtggcccattattcattccgtgtgcaaagtcgcaaacttgatttattaattccatttagtgtgccacttgataattcatttcaccttcacagatggcagtctgattttgagttttgctggattttccacagcctagagataaattatggcctcggctgctttgtttattttgaagagatggccaaatctgaattggcagccccagagcccgttctgcaaagagatggggtagagccttgtagaatgttcactggacgaacttggagaccgtccacgttcgacctcacccaagagctctctctaaaaggaccctggctctgtgctcccccaagcacgcagaagaccctccctcagtttgcactgtgcctgggattctttccagcatttcctactttatacagagaagccaagagtggtgtctgacaacttctgtgtaactggattttctggaaatatccagtgtagctccagggacatcacttttattcttctacactttccagcacccaccagacaccatgcatagatttcctttcttaaaaatctcatttttctaccttgccatggggctgatttgtatccaaaagtaatgctgcgtgtctaggactgaatgatggttaacaggatgatctaattgggatggtgagatggtcaaaagcataaacttgggggttgggtagacctggctggctgaccttgggaaaaacctctccacgcctcggtctccccctttgcaaaactgagctaagatctactgtgtggtgtctgggcagatgaaagtacactgcttagtgtgatgcttagcatggggcagatgcttggtaaattgtaatcacttttgttgtcagttaaatggatatttcactgttgcctcttaaacgcttacgataatatatactaattatacatgttattatcagtttatatttattgaacatttcggggaagtaattataaaataatcttgtctactgtcttaccccattccttgtatccttacttaattattgtatgaaaatttatgggagattcttttaggtttatatccatagaggatcctagcagacctaggcgtgagcagacacaagcccaggtgaccacgctgaagcccttcatccctggcacatgtggctgggttacactggacccttaaaaatgcttgtcctctcccgaccttgggctgaggcctcttgtacttcagttccgcaccttagctgctctctgacgggtcttaggtgttgaaatagtatttttacccccgtttgctgacatagtgaataacaacttagtcctgcctattttagtgctggtagaaaataaaaaagaaagcaatgacttagaacaagatgtttcatgaaaatgttgggcaagcagcagctttatgagatttaaatgaaagaaaaagcttgaagagctgtgcttgttggtaaattaagtttataaaattaaggacggattataatcttgacatctttgcagtcttacctttattatataccaactactcctgtttaaaattcatttcttgctccctgttgattttaaaaccctctaagcttcagcatgagagtaaattctaagctggcatgtgaactggtctgggtcccagtcaccgacagccaggctaacccccctcccaccaccaccaaatgtcaagccagggccctgactccagctaccaggtgctgactttacttgctcgagttaaaatgttgcttcctaaaaaccggcatgtttaactgagctattaatacaataaatcttgcctctaaagtctttcctttactccttttagctcaggtatgttttagcatagctttcaggaacattctcttcaaaaactgcaccttgctggcagagttgctacagaatgtggattttgaaaagaatatttgtaacgtacaaagtgtccagtagccccattagcaagaaggttcatgaagaaactgactgggaagttgatctgcttttattctcaggttgattgtacacagcactatgaactctgctccggaaaccaggttcgtggctatcccactcttctctggttccgagatgggaaaaaggtacgtctgcacttcttagtactgagaattcttcatctcttaaccccatcaggctgagctactgagtggtttaatgggcacagtgaattgccaatcttgattgttagggcactggtttggagaaatgtgtataatgaaacaaacgtctttctcttaattgataagatttgggttgtggagatgaaccttgaaacatttcagtggcccaggttatcactagaataacccacatcttacagtcacagggtaactgtgctctggtcgtaaacacaaaccttcaggcctttgaacagagctaaggcttgcacttggtccggttctgcctgcctccctccctccttccctggccgatggtcagcagctcagagttccccatcagcacaacggcttgctggcaggcctctgccccagacttctatgatgtgtaaccccgtggagggaagaggggcctgtacagttctctcaccaaagccgaggcattcagttatcctctctacattcccgtctaaatatgaacatgcagactttgcaccaccgctaagacatctgggagctctgacccgggcaagcaggggttgcaggaaggcttaagtgattcagaacacctcagtggactcactcagccgcgtgcccgtgtctcggccaggtggatcagtacaagggaaagcgggatttggagtcactgagggagtacgtggagtcgcagctgcagcgcacagagactggagcgacggagaccgtcacgccctcagaggccccggtgctggcagctgagcccgaggctgacaaggtgggtgcctgctggagtcgggatccccataagtggcccgtggcccccggccccccacctccccaccctcagaggcctcctcaaatgctttggacaaaatgacagtttggggacacagtcatctgatggttggctccagttgcgttttcaacacgtatttttcatcgactttcacatgctttcaggggcgaatgcaaacaaaagctttccttttgaaaacatgaaatggatgtgagacaaatcccaagacaatatttggtgtcaaaaatctctagagaatccttcctttccgcttcattcattttaaagaatgactctgctgggcatgtttctgctatgaaatctcgactgctggccccggggccctgattctattcctgaccttgctccgggcattttcctttacccgttgtaaaggcccctagaagacctgtagccaagagggcatccgcagcgatcaggccagtgactgtagctgtaacctgcctaggcagtcctgatgcactgaggggcttccttccttcactcaggtagcaggaggtttcagattcatttgttctgctttatgaagcccttgttatgtcacaggcactgttctaggccaccaggaaataaaaataagaccggtttcctgcctctgaagcatacaggtctctgaggcaaatggtgagaagacacacaagccaatggcagggggctggggcagaaatgtgtgcagggcttggctgctagagagaagtgggggcaaatgggcaagaagtgtccctaaagagctgattgacgggatctgtgctggacagataggctgggcagggctgccactgaggggctgcaccaggagaggcacaacccgagaatcagccggcatttctgcagggccagagctggggctgggggaacacagtgggagacaggtcagggtgtggtgtaggatccctgagagtgagagaggagctggagttgagagtctgtgggcagctggccaaggattatgaactgtatcccatattgacagggagcccacggaggctctgtgcagattggagttgtaggaaaatgaccggcatgcacgtgtgctggaggtgggaagctgctctattaggcctttaaagatgatgagttccctcatgctgcagccgtgactgtgcgatggcgaggaggagaaagccagcataaggagtccagccgctgtgcagcgcggaggagagggagggagggtccgaggcgagtctgattcccgcatatctggtggaggatggtacccagcacaggggcggggccagagctcgaggaaagggatgagcttggttttcaaggtgttgatcttcaaggctttcggctgtgtaggtggcagtgtccagtggcagttccaaccatgagcctggggctgcggcaggaggtctgcactggacgagagtgcccgtgtcatcctcttcaggtagaagtcatgcctgaaggccaggagtttggatttggaaaaaccagtggggccaccaacccctcctccctggtggggccacaccaggcctcctcacccctacaaccctgtccctagttgggctcttgtaggtcggggatggcctgagtgttgtttaaaagttgacgttttggttgaagaagtaaacagctgattttgtagttgtcaggaccacttatgttagaggagtgtatgtgtcatggtggttacaaaggtcatcccaaattgagtataattatacaccacggatgttttcatcgcagcaccatttctatttataatgcagttttccaccatgaagtgggtcttttcagtgcgtgtggcgtcatgtttctggacataaagatggtagtgttccacagtggcccccttggcctccgtcactgacatgttactcgatgccagactcaaatggagcagccctggtacacttagccacgtgataaatcatcccattcctgctctcaggagagaatcgcagatccatttttggagaaacacatagacgtcattctgtaaagaactgtcaagggagaatggctttaaagcagactaccatgtagcacctttcccttaaattctccagccagagcttccatcagcgtttttcacattgacttagaacaggctgctttccatttttatgttcaatgtaaaacaggtatcattgcctttgctattgtaactaggttctttctgttgcatagagaggatgtcacaaagggtgctaggagaatagggtggccagtgagaaaagcggctgaggatgagacttcagtgggtatcctggagactccaggcttagaggtgcagactcaagtgtcggacacccagggctgcctggtccacaccacagcgccctggagagttttcaacctgcctcatccccaaaagacagtccccctccccaccttcatcccctgtacagtatccagccacctcctcaccacatctcccaggcttgggacccagggacttgcattgatctctctgcccttcagaggctgccagcctccctttgtgtgtagcctatgaaatgcagattgtgtaggtatttctgtgtgaccttggagcctacgtaactgcatttttaaaaaattactgattcgtgtatctgcaatcccaaagcatggccctgctcaactttaagggatgtacttgaactgtggctttttcctcccttgaagggcactgtgttggcactcactgaaaataacttcgatgacaccattgcagaaggaataaccttcatcaagttttatgctccatggtaagtggctgtttaattagaaactactttgtccatgtgtactaagtcacatcatgtttttcagctcatctgccacccctccagactcaatgttgggcacatgttacatttatatgtaggtcatgttgtaggaaataaggaaccgttatcatgctcctatattcaaatattttaaacttcaatggccttaattatatatggagaatgaggctacagttatatcaactttgattatatatggagaatgaggctaaagttatatcaactttggagaaaacataaaaatggaggcaaattatgatggccatattcagttttgtggtatctgcacttttccaaatagatggcttttctttttggctaaacaatgagtgtcatgatgtagctttgctcctcggttcttttaagtactcggatttcttttgtagagaaatccagtagagtctgttagagccattcagtatgctacgcagtttcctgaacctgcatgccacgtggtcttggagaccagagcagaaatggattgcaggtagtgtgagatccagacaaccttggttctaagacttaccgtgaatgactgtatagtaaacttggatgtcctttaattcctttgaaccccagttccctcagctgaaaaatgggagtaactttttgtcttcacaaataaaacaatccatttggaaaagcagagtgttaggacaacagtagattgtttatctaaacatgataaaggcgtcacttttcttgtttgttacactccacatgttcctgagaaactaaccataggggtaaaaagttaataagcacaggacttgaacgaaccatagcaatgcctttcaaatcatttgcaacatttaaaaacctaaagctccacagatcaagtatcaaaaaagaggatcccctttggctgaaggggagccatccatacggcaggagggggtcagaagagacaagggaacagagtcgggtagaagggagggtttgaaccaaacttaatcatggccttgattctcaccccacatcgctgaagtaccaaggaggccttaaaatggttttgaaattgtgagaccataagcaatcaaatctaaaatgtctttggcattcaagtgaccttttagaaattgtgtggcatctgccctgttccctgttcctctgctcctgtgctttcataaaccagttagcacagttcaccatggcatggaaatggtctcagaatctcaacttgttttgagactggcttgcttctgtcacattatctgaaagtctaccttggatcaacttttgggttcttcatttgggataggaggaggaagagttaatgtgcacccagtgggagaatttggtattttacaaatttctaggcaattgttgactgtcccatacagaagaaacagagcttgtcttggcagcagagtgtaggtgaatgatctcgacccaggatttcaacgaagctgccatttttctcgtcttaggtgtggtcattgtaagactctggctcctacttgggaggaactctctaaaaaggaattccctggtctggcgggggtcaagatcgccgaagtagactgcactgctgaacggaatatctgcagcaagtattcggtgggtacttggatggatgcttatgggagctctcagtatgggggcagatcccaagggaactgtgcctcaaccacgataactcactctgctctcatcttctcaacaatgtggtttttatgtccctttgagttgtttgtttggagaagcaaaagagatcctctctcaaagggaaggcattcttcttcgcccgctttgtagttagtatccatgtttcagtgcaggttttcaggccttgctgtctgagtaacaaggccgtgaagtaacagaccccacgccatagactgtggggcttcccacaccgcgactcttgatgattgaccagtggtctgtagcctttgccataaatacccgagtcgctcatttttcacacataagccagcattataaaatgcagtggctgaatctaagaatcatttcaacataacctcctttctgaaagggccatgccagcaagtcggtcctgtgcttgggttaactactgccttcattccaagctgttagcacagtctgatggcctggaagatttgtcattttttttcttctttgttattcagacacttttggagccctttagatggagaatagacgtaacccagacatagtttccttatcattaaaagataccagttgttttttgtgccctaaaattcttagaaacgagttgccactgaaacatgtatcctcaagaggatcttgctctcatggtctggtctgcagaccaccagggcatcgccagggaggtcattggaaatgcagactcccaggcctgctcaatccaaatctgcaccttcagcagatccgcaggtgatcgtgtgcacagtaaagactgaaagcgtctgctttagggtaaagtcgttcctttgaggctgatctttaatgatgtcattttgaattcacaagtgaacacacagccccacggctgtgctttctaaacagtagtctgctcctgttttaatggaatatacacctttaaaaattagccacagaatttttccagccacaacggtaggagtgtatctggttttatttaggaagcaatttgcatgtgatctggaccgctggtttgcaaacttttttcttttttgttttaaggtacgaggctaccccacgttattgcttttccgaggagggaagaaagtcagtgagcacagtggaggcagagaccttgactcgttacaccgctttgtcctgagccaagcgaaagacgaactttaggaacacagttggaggtcacctctcctgcccagctcccgcaccctgcgtttaggagttcagtcccacagaggccactgggttcccagtggtggctgttcagaaagcagaacatactaagcgtgaggtatcttctttgtgtgtgtgttttccaagccaacacactctacagattctttattaagttaagtttctctaagtaaatgtgtaactcatggtcactgtgtaaacattttcagtggcgatatatcccctttgaccttctcttgatgaaatttacatggtttcctttgagactaaaatagcgttgagggaaatgaaattgctggactatttgtggctcctgagttgagtgattttggtgaaagaaagcacatccaaagcatagtttacctgcccacgagttctggaaaggtggccttgtggcagtattgacgttcctctgatcttaaggtcacagttgactcaatactgtgttggtccgtagcatggagcagattgaaatgcaaaaacccacacctctggaagataccttcacggccgctgctggagcttctgttgctgtgaatacttctctcagtgtgagaggttagccgtgatgaaagcagcgttacttctgaccgtgcctgagtaagagaatgctgatgccataactttatgtgtcgatacttgtcaaatcagttactgttcaggggatccttctgtttctcacggggtgaaacatgtctttagttcctcatgttaacacgaagccagagcccacatgaactgttggatgtcttccttagaaagggtaggcatggaaaattccacgaggctcattctcagtatctcattaactcattgaaagattccagttgtatttgtcacctggggtgacaagaccagacaggctttcccaggcctgggtatccagggaggctctgcagccctgctgaagggccctaactagagttctagagtttctgattctgtttctcagtagtccttttagaggcttgctatacttggtctgcttcaaggaggtcgaccttctaatgtatgaagaatgggatgcatttgatctcaagaccaaagacagatgtcagtgggctgctctggccctggtgtgcacggctgtggcagctgttgatgccagtgtcctctaactcatgctgtccttgtgattaaacacctctatctcccttgggaataagcacatacaggcttaagctctaagatagataggtgtttgtccttttaccatcgagctacttcccataataaccactttgcatccaacactcttcacccacctcccatacgcaaggggatgtggatacttggcccaaagtaactggtggtaggaatcttagaaacaagaccacttatactgtctgtctgaggcagaagataacagcagcatctcgaccagcctctgccttaaaggaaatctttattaatcacgtatggttcacagataattctttttttaaaaaaacccaacctcctagagaagcacaactgtcaagagtcttgtacacacaacttcagctttgcatcacgagtcttgtattccaagaaaatcaaagtggtacaatttgtttgtttacactatgatactttctaaataaactctttttttttaaaagtctggtctttccttcaatgttacagcaaaacagatataaaatagacaataaattatagtttatatttacaaaaaaagctgtaagtgcaaacagttgtagattataaatgtattatttaatcagtttagtatgaaattgccttcccagtacatgattgtgaaaaagacatttagaaaatattctaaaatttaatctgagcctcactttctacaagggaaatcatgatttccgttcataaacagcatgctcatccccctaacaccattcttataagctgggcaccctcattttattttcttcgttggttctaaccctgtggcgtggtatgctgtatagtaaaaaggcagagaaccactttactgaaaaggtactagagccggcagtccagaagttaatgtgctggtcaaagaaccgttctggtaaagaagaggtgagcactgccttcacgtgttacacggttacacaccccttgtagcctcacctcagtgtaatcagtctacttttggtactagcaaagagtacagcaaatggaggattgaggtgtagaaatggtatgttttggctgaaataagtgtattttcacaccaacaaaactccagcacgaacatacaacagcaatgactgagacaagggcgccccgtggagccctggctgtggcctgggctgtgcgtcctgtggacttctgggaatgaactgaacagaggcgttccccccacttccccgatttctgttctctgtaaaatctacctttgatagacagtactgaaccagctgatcctttagccaagaatacatttaactcctttgagattattttccctatttactaacaaacaccccaaatagcttgatctacagctaaaactaattttggtgggtttttgggggaggagggtaggaagagcttcacggttatgtttctgcagttaccagaccttatgctacagacatccaaactcagcttgctacagaccaacaactactcacgtcatttaccaagtgagcaaattattaatgaggtcctttaaaatcttcctgggtaataaggcactggcatgagatagtttcaaagtctcatcgtcccacctccaactgtgcttccgtgtttttttaaggcagatgtaatctaggaatccaaggcagaatgtgtgtccccagcatctggtttcgagttagtggcatccacaagctcttacaaccatattcctgtattttttcagaatgacattggagttgtcatcaaagtaaagaaccgagatggcatttagcttagttggcgcacagcacggtttggggacatactcggggttcataaggtgaacctgttccaaaacagaaggggagaaggtaccttagaaatgacacctggtcttggcttactcccacttacaaaacaaagtctccgagagctcaccaaggtctgcacaatcgcgtggttggttgcattcatgtgtgcgttgagtgggaaggagcattctccatcacagtaattggcagcatagcccttgggtgcaatgatccagtccttaatttcatgcaaaggaagcaacaaaagatgagcatgcacttctcacactatttgtgcttttcaggaatgctgtgaaaaggtatttttcacattgcacaggcaaggatacagacgcaggaaggcttaggaatttgtccaagttcacattcaagtggcaatgctgggaagtgaacctggtccatctgaccccagagccctcgctccttgcagaggcccacagggcctcagctgctacctggaagcacgtaggttgccagcaatatgtgcttggacccaagcaagcctctccaggagcccacggtgctcctgcggaagtagtgccacctgcatatggaagctaccttt

SEQ ID NO: 1218 - DNA, 1151 bp, Homo sapiens
gtggttattgacatgggcacaggcacctgtaaggtaggttttgctgggcaggccagccccacctacaccgtggccaccatcctgggctgccagcccaagaaacccgccacctcggggcagtccgggctgcagacgttcatcggcgaggcagcccgcgtgctcccagagctgacgctggtgcaacccctgcgcagcggcatcgtcgtggactgggatgccgccgagctcatctggcgccacctgctggagcacgacctccgagtggccacccacgaccacccgctgctgttctccgacccacccttcagcccggccaccaaccgcgagaagctagtggaggtggccttcgagtcgctgcgctccccagccatgtacgtggcatcgcagtcggtgctgtctgtctacgcccacggtcgtgtcagcgggctggtggtggacacgggacacggggtcacctacacagtgcccgtcttccagggctacaacctgctccacgccacggagcgtctggacctggcgggcaaccacctgaccgccttcctggcggagatgctgctccaggccggcctgcccctgggacagcaggacctggacctagtggagaacattaagcaccactattgctacgtggcctccgacttccagaaggagcaggcccggccggagcaggagtacaagcggactctgaagctgcccgatgggcgcacggtcacctgggcaaggagctgttccagtgtccggagctgctgttcaaccccccagaggtcccggggctgtcacccgtcggcctctccaccatggccaagcagagtctccgcaagttgtcactggagatgcgcgcggacttggcccaaaacgtgcttctctgcggtgggtcctcgctcttcaccggcttcgagggtcgcttccgggcagagctgctgcgcgctctgccagccgagacccacgtggtggtggctgcccagcccaccaggaatttctccgtatggatcgggggctccatcctggcctccctgcgcgccttccagtcctgctgggtcctgcgggagcagtacgaggaacagggtccctatatcgtgtaccgcaaatgctactgaccagggcagagctggggagggcgtgggggcagtaaagcctctgctacagccggc

SEQ ID NO: 1219 - DNA, 284 bp, Homo sapiens
ccccatgatgtgcaccccgccctggaactctcacaggctctccggaacccactccccaagaccattccctggacaccatactatcaagcaagacttggacatcagtgggtagtgatactcttaagggcttcccagtccactgcagtcatggggcagatgccccaggcaaggagcttcacctggacactggctctctcactcgccccagcacaggcacccagggcccatgtgtcccaggctatgcatccccatctccctccattccattaaaagtccatctctca

SEQ ID NO: 1220 - DNA, 13630 bp, Homo sapiens
  SITE (2408): n equals a,t,g, or c
  SITE (2615): n equals a,t,g, or c
  SITE (2616): n equals a,t,g, or c
  SITE (2635): n equals a,t,g, or c
  SITE (2636): n equals a,t,g, or c
  SITE (2639): n equals a,t,g, or c
  SITE (2642): n equals a,t,g, or c
  SITE (2643): n equals a,t,g, or c
  SITE (2649): n equals a,t,g, or c
  SITE (2650): n equals a,t,g, or c
  SITE (2652): n equals a,t,g, or c
  SITE (2653): n equals a,t,g, or c
  SITE (9943): n equals a,t,g, or c
cggttgcgctgcggagcgcagctgtgagggagtcgctgtgatccggggccccggaacccgagctggagctgaagcgcaggctgcggggcgcggagtcgggaggtgagcgcccagggaaaagagggcccgggagggaggggttcgcgagaggacggaaggatcggcctccctgggcccgggacggtgggacccgccagccgggtgctgaaggcgggccctgctcactcagtagcccaggcccgatcgggccctgcctgctggagccgaggggccgcttcggccccgccagtcgctgcttagccctccctggcgtctctggcttggcggcggcgccccgggattctgcgggcgcgggtcgggaggccctggcgttcgcttggaactccgcgctgcgaagaggcggggccccgccgggtgggggcggggccgggggcgtcggtcgcggcccggcggcctgcggaagctcggcggcctggcctggcctgctcgcggggaggtgcgcagactgcgcgggggcgtggcctgcgcccctgactgcgctgtcggtccggcctttgatgaggtggccgccgctggctccctgggccccagcctggttcccgcgcgggccgcggctgccttccagacgcagggcatgcgacctgttggagtgtgaaattctatgggccgggttcctccccagagcggttttatttccgactggactgtgctgcgggtctcagaggccctctggtccgttcagggtgaggacagctgagaggcctgggcccgtgagctcttgcagaggagttgacacgcagaggggctgctgtccaataaacgaaagtgtcggggaaaaactttgcagggcgatctgcattactccaaagtgaacacactgcatgtctcagggtggctggaggcggcgaggagaatccccttatgggagtatatgagcttttccatgtgttatctctttaaaacctctcagcggctccgagacaaaactcccagtgtcgcagaggtttcttcatcaataggagtagtgctggagaatcttgggcactgccctcattttgcctgcgaaggaaaaattaggaagggataaaaagtcacaaaaattaggaaggtgggggggataagcaaattccaagggcatctatctctgatgaagggttggtgtctcctgtggtgccctactgtggattagttatttgtgtcctcggtccagaagtttctctggagcccattggctacagctttcctgtattagaattctactgttatttcctactgtagtctggctgggaattttatttagttgttcagattttagatgcattcagtgaatgcagctgctcaaggaagtaactaatagtgtcttaccattttcttagctacttttcagaagaaggaacatgatctctaacagaagttttctggtagattactaaaacaggcagatagtagctttcctggctggctgagttaaatccctctccagcgatcctcccacttcagcctcctaagtagctgggattacaggcatgagccagcgcgcctggcaaatctctctagaataagtcaggatctagaaaataacatagggaaagaatatcttgccagatttcctctgtactgcctattgctctttggtatttactagactgtcttctaataaaaatctcctgagttgagttaaacgtagtgtagattgggggcagagatgggcacaaatgggcatcagagagttctaaaaataaatgtgggcttttcaaaagattggtgtgttgactggagacttctgaacttagaggagcacatttagtttccagggtatcagtttcttttccttttctttctatttttttttttttttcttttttttgagtcatagtctcactctgtcacccaggctggagtgcagtggcgccatctgggctcactgcaacctccgcctcctgagttcaagtgattctcgtgcttcagcctcttgaataagctggaattatagacgtgcgccaccacaccctgctaatttttgtatatttttgtatttttttgttgcccaggctggtctcgaactcttgagctcaagcaatctgcctgccaccatctcccaaagtgctgggattacaggcgtgggccagcttgcctggcccagggtatctctttcatactgtagagaactctcttgagctgagcacacacaggttccaactccttcacagtctttattcttagagatatgaaataacattaagtggttgtcttgtgactttttgtacaagttaatggcatttagctctcaataattctttttcttcaagtacccatgaccctgaaaatgttatgctgtataatactttttcctataaaagttgtaccttgagttatttatacttgtaagaaataacctaggctgggtngtggtggctcacgcctgtaatcccagcactttgggaggctgaggcgggcggatcatgaagtcaggagattgaaaccatcctggctaacacggtgaaaccccatctctactaaaaatacaaaaaattagctgggtgtggtggcacgtgcccgtagtcccagctactcgggaggctgaggcagaaaaatggcttgaacctggcaggcgnnggtgggagttattttaganngcnccnngggggnncnngcctgccccccagagtgagactccatcccctctgccaaaaaataaataacctatatcagatctagtcccccagagaatggaaacttcagagcctttgagcaatgtgaatgaaatgaaagctggaagcttaaagtcttagctctggcttgaatttgtggctgcttgaatgtgggcatttattttgtttgttattgtatctcaaggacttagcccagtgcttggcccacaataaatgcttaataaaacatctgttaaatgagtgaatgaaaaaaaaaatgttgttaaccaatacccatttgtcacactcacatcacaggaaaggtgaggtcatcagggatgaagtcactaacaactgccagtcatgtgccccaagggtagcctcaccatggactagtgggcttgttctgtgtagagaagggatggatagtgaatgccaaggttagttctagctggataaattagccaagggtttcagctggataagttggctgagggtgctacaggtctagccttaaggctgtctcactgaaacattttggagtctggagtcatctgttctgaatagcgcccacatagtttatatttttttattttttgagacagagtctcactctgttgcccaagctggagtgcagtggcacgatctcagctcactgcaacctctgcctcccgggttcaagtgattctcctgcctcagcctcctgagtagctgggactacaggtgcgtgccaccacacccagctaatttttttatttttagtagagacagggttttgccatgttggtcaggctggtctcgaactcctgacctcaggtaatccacctacctcggcctcccaaagtgttgggattaaaggcgtgagccactgtgcccgtccacacatagcttaattcttgagcacagtaaaaatagggtgtacttggggattcaaagggaagcctattggatgagtatttgccaagaaggaatggagcacctgatcttgctggtgatttgaaccttactctaagtgggattagactgccataaatcttgtgtttgtcattcctgggagggtcatcttcaactaagatagctccccttttctagactagagttaggagaatagttaatgtttcagtatttaggactgattctgattttggatttaaaggaaacaaaggtggtgtgtgttttctatttttaatttttaaaagttttgtgtagagactggggtctttttatgttgtccaggctggtctcaaatgcctggcctgttttattttcttttgaatttgcagataagtattaggattattaaatctttttttttgtttgtttgttttttgttgagacagggtctccctctgttgcctagccaatggcatgatcatagctcactgcagcctcaaactcctgggcaatcaagtgattctcccatcagcctctcgggtagctgggactatagctgtgtaccaccttgccctgctaatttttaaatttttttgtaaagatggggtctcactttgttgcccaggctggtctcaaacacctggcctcaaatgaacctcttgcctcggcttctcaaagtgctgggattacagaggtgagccactgtgctcagctggattactaaatttttttttgagatggggtcttgctctgtcacccaggctggagtgcagtggcgtgatctcagctcactgcaacctccacctccctggttcaaaaaaattctcctgccttagtctcctgagtagctaggactacaggcacgcgtcaccacacccagctaattttgtatttttagtagagatggggtttcaccatgttgatcaggctggtcttgaactcctgacctcaggtgatctgcccacctcagcctcccaaagtgctgggattacaggcatgagccaccgcgtccagcctggattactaaatctttacagatgtatcctgactttctctgccttttccctctgtatttgccccaaccagtgcaggcctgagtgttccttccagcatgtcggagggggagtcccagacagtacttagcagtggctcagacccaaaggtagaatcctcatcttcagctcctggcctgacatcagtgtcacctcctgtgacctccacaacctcagctgcttccccagaggaagaagaagaaagtgaagatgagtctgagattttggaagagtcgccctgtgggcgctggcagaagaggcgagaagaggtaaggttatggtacagttactcttgggtgagtgaattctggaaaggtgagaactggaagagcaaagtcttaaaagaggccaaccaaacttcaataggttgggggctaggaggagatgatcatatggagtgttaaaatggaggatttgtgagataagtttaattctctttcatatgaatttcttctcaggtgaatcaacggaatgtaccaggtattgacagtgcatacctggccatggatacagaggaaggtgtagaggttgtgtggaatgaggtacagttctctgaacgcaagaactacaagctgcaggaggtaggtgatgctgaaaaggtgaagcctggggaatgttggaacactgatgttagagaggaattggtgttgggaagctgcccgtgaggagagtatgttggggttagatcgtttctggggagggatagggaatggcttctcaggattattacagtgatttgtgaactctgttattccactgtctcccttgctttcaggaaaaggttcgtgctgtgtttgataatctgattcaattggagcatcttaacattgttaagtttcacaaatattgggctgacattaaagagaacaaggccagggtaagaattttttccccatatttcctgaacttattgcaaagagactagctacatttattattgttccttttacactcagagattaaaacaaggtagttttgaaacagaactggaatcagctgcaatggcgataagagtagggcttcagttgtcacctatgccttttgtgtggctatagattgggcagaaaatgagtgaacttttgcttccttcttcccataactttcattgcttgttttcattgccctatttagtctaagtaagtaaagctaagaacaaaaggagagaaattttaacaaaccttcaaatttaaaatatgttaacaagggaagggatcatttctactataaggccttttagtaagtgctttgcctccccaggtcatttttatcacagaatacatgtcatctgggagtctgaagcaatttctgaagaagaccaaaaagaaccacaagacgatgaatgaaaaggtatagaaggagagcagacaaagtttgaggctggtttttgggggtggttttaaaaaggactctgttaataatgaagctgatcaggaagggacggaaggagctagtgggagagagttaagagagggaattactgctgacccttggatccaactttgttccaggcatggaagcgttggtgcacacaaatcctctctgccctaaggtaagtagtacctggttagtttcttacccatatttcctgatgtagttactccaaacagatttcagggcactactcttctgttctattctgcctctccccactttctttgaatcatatactgtcaagattagggcccctacgggtcttttaaagggtgcgtcctaatgccctaaccacgacacttatctcctacctctttctcctagtgcttatccagctatttaaatcatcaggcataatggagattcagagtgtggggattatctttatggtgaccagcaggagacctggcccttgctcctcttaacccttgggttccccctgcccttaatttcccagtggcccctctaacagcccagtgcccccacagctacctgcactcctgtgacccccccatcatccatgggaacctgacctgtgacaccatcttcatccagcacaacggactcatcaagattggctctggtgaggggagggagaggttctgggcaggggagcctcgggaatttgggaaccatgggggtaagatgaaaggaatgggggataacagagcaaaattctgaggtgtgggctggtgagaagagaaaggaccttgctaggagtaattaataggagaggccagttaattagtggagagggggtaggatatataatcttacacctttttgaagggaaaattggggttaatacagagatactgataagaggctgggaaagggcaagagataggtttgaggtttgatttgagtcctggggccagaccctgccagaggaggttccaggctgttcctgctgtgagtgctttcgtttgctgtgtattgtatgcagtgtacaacatttctgtgtgctgtgtctgtgtggtatttgtgtgtccatttgtctggggcttggctgctccatcgctcacaacttttctctgttttcctccctcccgcttacgggctgctctgttcccaacagtctttcataggatttttgctaatggtgagagctccctctgccccacttggggctctgtttgtgctccctctgctcccttggcggctgcccagtgcatgcagtcgtgggagcaaaccctcttcccctatcttccctgcctaattatgcctgcttagcttctgccctgccagccctccgcctgcttgccccttcataacctgcttgtttcctgtggattctgcctggctggccacttacctcctggattcatgttctccctcatcatcaggctagttcccagatcatactgtgctcccagattctctgtgacttgtagtcattgtttatgatctgagtgagtccaaattgggcctggtcctggttcctcgttcagctctgtggcagacagtgttgaggaataagggggtagaacaggagtctaaaatgttttggtggattaaaagtggaacagattcaagggtattagctcaattctgagctgttttgagtttcactcagcaaaggtgggtaagaaggaggctacctcctgagctgtatgttaatacttcttatccttatttatccaagttcctgaggtctccaattgtcccagattaggaagggctgcctgtgtttttatgttatttgcagggtggatgaaaaaactaaaaccaaatattttcatgtgagcagggattagaggtacctgggatttagggaaggtgaacgcagtacaagtgaaaatttttccttaaacttcattgcttctagaccagcctgaagcccctgtgtatctgttaatttagtctggtgcttttgttgctcctgatttagggacattagatgagaagcagtaggcctaagaaaggggaggtaggtggcatccatgtgtggtctgtagttcaggacaggaaagggaatacgtttgtgcctgttgagggtcatcagaaaggagacttcaggagagaatttggcttttggggcctctctctggagtgagactattcttcattgatgatggtcagattgtgggtgtctcccctactcccagtggctcctgacactatcaacaatcatgtgaagacttgtcgagaagagcagaagaatctacacttctttgcaccagagtatggaggtgagccttcctgctttctctgccctgtcctcatccccctgcttttgcaccttataacttgaggtacagaggcaatataactgaaacttctaggccttctctaccagcatacaaaatatttttcttttcttttttttttttcctaaggcattcctgccaaccctagcccccaatcctctgattaaccaaagccttctctgttttccctagaagtcactaatgtgacaacagcagtggacatctactcctttggcatgtgtgcactggaggtgaggggactggaggggaggggggaaaggggtcagatgagaagatggaattgggaatggagggaagacaagtaaggcgctggcttggagggagtgattgtgggagcactgaagttcttaggtgtctacttttttttttattcttcctcactgaagatggcagtgctggagattcagggcaatggagagtcctcatatgtgccacaggaagccatcagcagtgccatccagcttctagaagacccattacagagggtaaggatcttcaggatcactccctcctcaactgaccttcaaatgtcttctggtttttcttcctttgtacccactgggtatatgctcctaagagctagggaacataacagaaaggacacgaaaaatctataaacattttcttaggaggtgcctaccatgtttttgcatagaaacacacaggtaagggggttaagatggatgatgctggggttaaaagttgtgtgttggaagccgggcatggtggctcacgcctgtaatcccagcactttgggaggccgaggcgggcggatcacgaggtcaggggatcgagaccatcctggctaacatggtgaaaccctgtctctactaaaaatacaaaaaaaattagccaggcttggtggcgggagcctgtagtcccagctactcaggaggctgaggcaggagaatggcatgaacccgggaggcaaagcttgcagtgagctgagatcgcgccactgcactccagcctgggcgacacaggtagactccgtctcagaaaaaaagaaaaaaaaaaaagttgtgtgttggctgggtgcagtggctcacacctgtaatcccagcactttgagaggctgaggcgggtggatcacttgaggtcaggagtttgagaccagcctggccaacatggtgaaaccctgtctctactaaaaatacaaaaattagctgggcatggtggtgtgtgcctgtagtctcacctactcgggaggctgaggcaagcttgaacccgggaggcggagattgcagtgagctgagattgggccactgcactccagccggggcaagagagcgagactgtctcaaaaaaaaaaaaaaaagtatgttaatttgaatgtgtctacatggaggtaaattaatttgatggttacttcaggccattgctgtatactctcagacagccatttttatatttttaagcacatcagtcaatttaaattaaaccagttgtttgggattttatatttatacagttttagttagggacggtggcctgaaataatgagctaagatttaaaagacataaggttatgaatcagttgatagactatagtaagcagagcctgggcaggaaggtccaaacaagaacagtttgtaactcattagataagtatagtagggaacaggagagaaaagaagactagtgggaagtcaggaggatagtgtggagtaagtttctacttcancattgaggtgcagtataaaagtgaaagattaggtatgtgaccttgttagccttcaaggttaaaagcaggaaagcaggttaattgtcatgggacatgcaggaggtagaaaaggaggcggtggtggaacatggtggctcatacttttaatcccagcacttttgttttctgaggtcggaggatcacttgagctcaggagttcgagactagcttgggcaaggtggtaaaaccctatctgtatgaaaaaataaaaattatctgggtatggtggcacatgcctgtggtcccagctactttggaagctgaagtgggaggattgcttgaccccaggaggttgaggcagcagtgagctgtgattgtgccactgtactccagcctggttggcacagcaagaccctgtctcagaaaaaagaaggaaagaaattagggcagaattgttagaggaatcctgggaaattcggtgaattcagtgattgtgggcaaaggaaattgtgatactaggcttgtgaaataaaaaaatggtgaatattgatcacattgggtaagtttgggaagagagaagctaaatttggcaagatttagaaaagaagataggcagtgagttgactaataaagcagagaggtagaaactaaggaaaaagaaagtgtggggccgggcgcggtgtctcatgcctgtaataccggcactttgggaggctgaggcgggtggatcacgaggtcaggagattgagaccatcctggctaacatggtgaaaccgtctctactgaaaatacaaaaaattagccgggcatggtggtgggcacctgtagtcccagctactcgggaggctgaggcaggagaatggcgtgaacccggtaggcagaggttgcagtgagctgagattgcgccactgcactccagcctgggcgacagagcgagactccgtctcaaaaaaaaaaaaaaaaaaattgtgaacattaaaaaagaaagcttgtggttggagagcagaaaaataattaaaaccagaaaggcagtggatggtatctttcatataatatcttacagtttttgaagccctttcaggtgcatttttcaatatattgttttctcagcaagtgctgagcacctactatgtacaaagccttgtgctaagtagaatgagagctataaagatgaacacactgggggcttgccagatgcctgctccagttccttgtttccttttctaggagttcattcaaaagtgcctgcagtctgagcctgctcgcagaccaacagccagagaacttctgttccacccagcattgtttgaagtgccctcgctcaaactccttgcggcccactgcattgtgggacaccaacgtgagtcgtcttggccctatggggaatagtcttccaatctggagccctgtaactatcactggcatgcttgttttcctctttatttccaaagggattctttttttttttttttttttttgagagatagtctcactctgtcacctaggctggagtgcagtggcactatctcagctcactgaaacctccacctcccaggctcaagcgattcttgtgccttagcctcccgaagagctgggattacaggcatgtgccaccatgcctgggtaatttttgtacttttagtagagatggggtttcgccatgttggccaggctggtcttgaactggcgtcaagtgatctgtccgcctcggcttcccaaagtgctgggattacaggcatgagccactgtgccaggcctccaaagggattctttacccctttgcctgcatgccttctatgacatttaatctgactatcccttcataatatcccactccatcatgccctccagacatgatcccagagaacgctctagaggagatcaccaaaaacatggatactagtgccgtactggctgaaatccctgcaggaccaggaagagaaccagttcagactttgtgagtaactgagagggtctgaaaggggcagattggtcactaccactcttgaggctctgtaaactgtccattctctgggaatgcttgaatttgctattttgcttgtttctttccttccatctcctttctcttttctcgtccaggtactctcagtcaccagctctggaattagataaattccttgaagatgtcaggtgagagcagagtgagaagcaggctttcttgaggaagcaggcggggttgggtatcctaaggcgttcacagagcccatgtgacctgtcttcatctccctccaggaatgggatctatcctctgacagcctttgggctgcctcggccccagcagccacagcaggaggaggtgacatcacctgtcgtgcccccctctgtcaagactccgacacctgaaccagctgaggtggagactcgcaaggtgggggctgtgtgggtgtggattgtctccatggttgtggtggaagggagagaggacatctcaaataaggctctatcctttagagaaaatgctccctagcagccatgccctatgggctcgaaagacgtctaggtattgggttttttatggacaggtctctagagtgaccctctcttccctccctaggtggtgctgatgcagtgcaacattgagtcggtggaggagggagtcaaacaccacgtaaggctcagggctagggttgcgcagggctagtagccagagggtagggaagaaaagtctcattttctgactgtcctattctccagctgacacttctgctgaagttggaggacaaactgaaccggcacctgagctgtgacctgatgccaagtgagtctctcctttccctcagaggatggagagtctatgagccttatcttttagggacatattcaggggtgggggaggtgacaaggcagtaacacattgactcacatagaatgactatcttagaccctaaagcagtgggtggatctgactgacagtttagccctagtggggctgtctgaagggccccaggtccctcagtcccgtactgtactcaccccctcctgtttctttgtcagatgagaatatccccgagttggcggctgagctggtgcagctgggcttcattagtgaggtgaggtttctgccttcatctgccctggctgcccccatgccttctcttctctcagcccccatcttactgagctcttctcccccaggctgaccagagccggttgacttctctgctagaagagaccttgaacaagttcaattttgccaggaacagtaccctcaactcagccgctgtcaccgtctcctcttagagctcactcgggccaggccctgatctgcgctgtggctgtccctggacgtgctgcagccctcctgtcccttccccccagtcagtattaccctgtgaagccccttctctcctttattattcaggagggctgggggggctccctggttctgagcatcatcctttcccctcccctctcttcctcccctctgcactttgtttacttgttttgcacagacgtgggcctgggccttctcagcagccgccttctagttgggggctagtcgctgatctgccggctcccgcccagcctgtgtggaaaggaggcccacgggcactaggggagccgaattctacaatcccgctggggcggccggggcgggagagaaaggtggtgctgcagtggtggccctggggggccattcgattcgcctcagttgctgctgtaataaaagtctactttttgctaaaa

SEQ ID NO: 1221 - DNA, 428 bp, Homo sapiens
ttttgtatttttagtagagacggagttttactacattgagcaggctggtctcgaactcctgacctcaagtgatccgcccacctcggcctcccaaagtgctgggcgtgagccaccgcgcccggccgaaagattggttttaaaaacgagtattttgagatgatgagaaaacgagagggtttctgccagttgtcctttctcccagtgaaacaggattagagattctctttaatgacagtaaaatttggtgattgtgacatttccaagttctgttgattgattcatcatcttccctccatcatacacgtctaagggcagagtgaacttccatcctgaaggctccgcgcttagttttcgcagattaatagctcaccaagaatttatcatcttttctttccactaactcgaaaccaatctaaattctttccaaa

SEQ ID NO: 1222 - DNA, 1922 bp, Homo sapiens
caggtacagcggccctgcggctggcgcggcggacgggatgaggcgctgcagtctctgcgctttcggtaacttccgggccctggcgtctcgtctccttaccctggggctacccttgcccggtcctactgcccgcggttaacccgccgcgagccgcctctcccctccccgcccgactcaaccctgccctcccccgtgctttgcagacgccgcccgggggcccaggcggctgatgcgtgtgggcctcgcgctgatcttggtgggccacgtgaacctgctgctgggggccgtgctgcatggcaccgtcctgcggcacgtggccaatccccgcggcgctgtcacgccggagtacaccgtagccaatgtcatctctgtcggctcggggctgctggtgagcgcggcaggcgacccgggcgggggccgggctcccggagagcccagcaggccaaaggctttgtgtcttccacagagcgtttccgtgggacttgtggccctcctggcgtccaggaaccttcttcgccctccactggtgagagggacttccctggagcttttaacgagtaggcttgagtcagggaaatgggggctgactgagcttggtctttcaatagattggaggagcctcagagaaactgggtgtctagtcactgggagagttagccaggcccaggctgctcaccctgatctcctgtccctgccagcactgggtcctgctggcactagctctggtgaacctgctcttgtccgttgcctgctccctgggcctcctccttgctgtgtcactcactgtggccaacggtggccgccgccttattgctgactgccacccaggactgctggatcctctggtaccactggatgaggggccgggacatactgactgcccctttgaccccacaagaatctatgtgagcacattctcttccttcttgtggtctacaaagccttggtcctgcccttttaatttcccctatttgctgcacttgccctactccctcctactccccatccttcttgcttttcaggatacagccttggctctctggatcccttctttgctcatgtctgcaggggaggctgctctatctggttactgctgtgtggctgcactcactctacgtggagttgggccctgcaggaaggacggacttcaggggcaggtaaggaaggcaaacaggaagggttcattccacagagactggctgtgttgaaaagatgctgaccggccgggtgcggaggctcacacctgtaatcccagcactttgggaggctgaggcaggcggatcacttgaggtcaggagtttgagaccagcttggacaacatggtgaaacctcgtctctactaaaaatacaaaaaattaggtggggtggtgggcgcctgtaatcccagctacttggaaggctgaggcaggagaatcgcttgaacccggaaggcggaggttgcagtgaaccgagatcacgccactgcactccagcctgggcaacagagtgaggctccgtcacaaaaaacaaaacaaaaaaaagatgctgacctatcattcagggcgagggtgtctaactctatcttcttctgcagctagaggaaatgacagagcttgaatctcctaaatgtaaaaggcaggaaaatgagcagctactggatcaaaatcaagaaatccgggcatcacagagaagttgggtttaggacaggtaatgggccttgaaggtggtggcccgggtaagagcggggacaaggaagtgctcttagaactgggtctaggtcttgccatgctgctttcccctctgacctgggttggttctcccctctgtccagcaggtgctgttccgagactcagtcctaaagggttttttttcccactaagcaaggggccctgacctcgggatgagataacaaattgtaataaagtaacttctcttttcttcta

SEQ ID NO: 1223 - DNA, 597 bp, Homo sapiens
  SITE (5): n equals a,t,g, or c
ggggntggcgtgatgtgtaacttcttcgcccagtcggctgaaaacgccacgctgaaggatgtgagggcaacgagtacatcgatttcgccgcaggcatgcggtgctgaataccggacatcgccaccctgatctggtcgcggcggtggagcagcaactgcaacagtttacccacaccgcgtatcagattgtgccgtatgaaagctacgtcaccctggcggagaaaatcaacgcccttgccccggtgagcgggcaggccaaaccgcgttcttcaccaccggtgcggaagcggtggaaaacgcggtgaaaattgctcgcgcccataccggacgccctggcgtgattgcgtttagcggcggctttcacggtcgtacgtatatgaccatggcgctgaccggaaaagttgcgccgtacaaaatcggcttcggcccgttccctggttcggtgtatcacgtaccttatccgtcagatttacacggcatttcaacacaggactccctcgacgccatcgaacgcttgtttaaatcagacatcgaagcgaagcaggtggcggcgattattttcgaaccggtgcagggcgagggcggtttcaacgttgcg

SEQ ID NO: 1224 - DNA, 583 bp, Homo sapiens
ggggttggcgtgatgtgtaacttcttcgcccagtcggctgaaaacgccacgctgaaggatgttgagggcaacgagtacatcgatttcgccgcaggcattgcggtgctgaataccggacatcgccaccctgatctggtcgcggcggtggagcagcaactgcaacagtttacccacaccgcgtatcagattgtgccgtatgaaagctacgtcaccctggcggagaaaatcaacgcccttgccccggtgagcgggcaggccaaaccgcgttcttcaccaccggtgcggaagcggtggaaaacgcggtgaaaattgctcgcgcccataccggacgccctggcgtgattgcgtttagcggcggctttcacggtcgtacgtatatgaccatggcgctgaccggaaaagttgcgccgtacaaatcggcttcggcccgttccctggttcggtgtatcacgtaccttatccgtcagatttacacggcatttcaacacaggactccctcgacgccatcgaacgcttgtttaaatcagacatcgaagcgaagcaggtggcggcgattattttcgaaccggtgcagggcgagggc

SEQ ID NO: 1225 - DNA, 362 bp, Homo sapiens
cgtcgtctttctgccactccgcgcggggttggcgtgatgtgtaacttcttcgcccagtcggctgaaaacgccacgctgaaggatgttgagggcaacgagtacatcgatttcgccgcaggcattgcggtgctgaataccggacatcgccaccctgatctggtcgcggcggtggagcagcaactgcaacagtttacccacaccgcgtatcagattgtgccgtatgaaagctacgtcaccctggcggagaaaatcaacgcccttgccccggtgagcgggcaggccaaaaccgcgttcttcaccaccggtgcggaagcggtggaaaacgcggtgaaaattgctcgcgcccataccggacgccctgg

SEQ ID NO: 1226 - DNA, 105 bp, Homo sapiens
aaatccagcaacgcgcgctggcgcaggggctgctcctgctgacctgtggcgcatacggcaacgtgattcgcttcctgtatccgctgaccatcccggatgcgcaat

SEQ ID NO: 1227 - DNA, 13485 bp, Homo sapiens
ctgctactcactttaacctcaagacacacacgaattctcgagatctgaagacagccatagagaaaattactcagagaggaggactttctaatgtaggtatgtgatccggattcaaattatactatcttgctaccatcgttctctttctacgtgattgtcttctaaccattctatataaaaggaaaaaataataataatccgtcaagaaataacttctggtcgggcgtggtggttcacacctgttatcccagcactttgggaggctgaagctagcagatcacttgaggtcaggaattcaagatcagcctggccagcatggttaaaccctctttctactaaaaatacaaaaattagctgggtgtggtggcgggtgcctataatcccagctacttgggaggctgaggttgcagtgagccaagatggcgccactgcactccagcctgggtggcagagcgagactccatctgaaaaaaaaaaaaaaaaggacaaagaaattactcctgcaacatctatatcttttctaaagttatcatggcttcagagggcaagaatctttaacacacacacactgtacagtcccagcatgcttggtttgcaagaaggggtagcattcttcagggcaatcaagtctgctgtcctgactatttttttgttggcctacaagtcatcacttgtttcattaaattttgtgaccagttaaggaagcccctcagtgccccttgagaatcttgttccaatcaactaccgttgtagtgatgattgtgcaaagagaaacatgttctctgtttcaagctaggtcttctgtgatatctgagcctttggggtctcaccagaaatccaaagtctagtcctcagtggggcatgtccagaaattccattttatgtttatccagagttgattggccattaggaaacagtttcacactaaccaagctcaaagactgtcaaagagcccatgccagtgtattcatttgtaaatgaaagattggctttttgggcactggagggagactgtccacctctcggggaaagtgtttctgtcatcaaaatccaaagaaatggagtcatgagccacagttgcttggcttagagtacatgcagggaattgagctgtctttgagggagcatcctcagagttacagtaaatccgattaaagatttcccttcccacttcagtgtatgtctctatagtgaccagaacattagtatctaacacatacagagcttttcacctttgaacaatgctaaataaacactagccaagtcactctccatgcccccaaagcagtattaccttcatcacacacatgacagagttgatttctggtttgtttataacttaatgcttacattagtaaaatcccagtggagacaaatgtcagaaggcactctcgttccttgacgaggttagcgatgggtctcaatccaatcagcatacgtttttcagtggatgacatgttctgactttgcctctgtattgtccagagtttgggttctgaggacagaatccgttcaactgattccaacagaaagggttggaatttcaggctattaagtagtttggagaatcactgtaagaactgaagaagcagactgtaggctgagctttaagagatgatgtctgaaggcttcctgcagaagtaggacctccaagggagctgctccttcttccaagattaggaaatcactttctgaattttgccatggcaacctcttcagaaacctgctttgtccaggaagccagcaggatcaggagatcaggaagcttcttctagagctgccagctccagaaccacgccctccctgtgccattcacacccacaacatggatctccacaccctgccgccccaaaccactgcagctagcaaccaaccccaagcacctctgcggacagtatcccagagaagtcagatactaaagatatttgtcagcagaaatataaacaaaagtacagcctctgcctcacttttatcttctaaatctcatgcaagtgcatcaattcatggaactaaaacaaagctaaatccctagctgcaagggagtctggaaaatgtagttttctgatttccagcctctattttcaagacccactggaaggtggatggaatgtgtgttgagcactatacaccatggcctccagatataaggttaggtggggttgaggggatcttctcatggcgtcttgtgctctgccctataggtgcctaatattaggccagagaggacttccgggtgctttgtgctttgggaaaaattgtccattggctataaaagcaattcttagcagccaaggtttttccttagcaagtgggttctgtgcagccagttcacatgggttttccaagacatttctgcagcatctgtatatgtaaccatttgatgctctcatttgacaagtaagataataccagctagtggagacaggatgctggccaaaatcagaaatgcattgagtataatactactaatcctaaagtctaaagaaggtgcttcttaacttttatggagattgaggactcctttgagaattccgtgaaagctatggcccttctatccagacagatacttatatacacaaaatactgtgtataatttcaagtgccctggggttcacagagcccaggttaagagctctgcctactctatacagccatgctgactctagggtgaacggtcatcccagttttcccagaaaaacctggggctttcagtactaaaactgggaaagtcctggcaaactgagacaattggtcattgtctagttgactctgaaaatttcctgaagcccttctcagtgtgaaatatgcacttggaaaagtcatggcaggaggctttgtagcacttcatggctgctgcactcagctgaagtagattgctgttatggaaagctaggcccagagatgtagggtgacctactcagggccacacagctagcaggtagcacagccagggctagaacacagtctgtcagttcccagtgggtgcaactcttccctgcccaaccagacctgtgcccttggcctggaactggaggaaaaacactcctgaccccagaacacagctctgtacagccagcaggagcctcaggctcaccccaggctgcagggggccaagaagaggctactgtcactccaggtcaactcctcccaccctacactcttggaaacaacatggggctggcttaggggcttagtgtgggtccagcagaaaaggggcacttctgttcgcatgaaagtctttggccaggcacggtggttcaaacctgtaatcccagcactttgggaggccgaggcaggcagatcacaagatcaagagatcgagaccatcctggccaacatggtgaaaccccatctctactaaaaatacaaaaattagctgggtgtggtggtgcgtgcctgtagtcccagctacttggcaggctgaggcaggagaatcacttgaacctgggaggtggaggttgcagtgagtcgagattgtgccactgcactccagcctggcaacagagtgagaatctgtctcagggaaaaaaaaaaaaagtctttctcacctgcttgctgtccctaaaactttcttcaaagcggagacaattagaagttgaaggcttgaaatgaaaccaaaatggacagtggtaacggctgcacattgtgaacgtacttaatgccactgaattgtacacataaaaatagttgaagtgattttaaaaaagtaacaggccgggtgcagtggctcatgcctgtaatctcagcactttggcaggctgaggtgggtggatcacttgagcccatgagtttgagaccagcctaggcagcatggcaaaacctcgtctctacaaaaaaaacacaaaattaaccaggtacagtggcacacgcctgtagtcccttctactcaggaggctgaggtgggagggttgatgaaactcaggaggttgaggctgtagtgagctgtgatcgaaccacttcattccagcctgggcaacagagcaagaccctgtctcaaaggaaaaaaaaaaaaaaaaaaactagggagggaatgagtgtatttttctggacctctttgtgctgctgtgatctcttcctgtatttataatcagcgtgatcactccaagcatgaattttctttttcttccaggtcgggccatctcctttgtgaccaagaacttcttttccaaagccaatggaaacagaagcggggctcccaatgtggtggtggtgatggtggatggctggcccacggacaaagtggaggaggcttcaagacttgcgagagagtcaggaatcaacattttcttcatcaccattgaaggtgctgctgaaaatgagaagcagtatgtggtggagcccaactttgcaaacaaggtagatgactgcccggagacctacccaacatcaggattttctgcactctgaaaaattgtaacgccgttgcagtggttttcccatgcctttaaatgtgcatgaagctcatctctaggcagtaaggcctccagggagggactggtcaatccgaaacctgcaattaccctctcaaagcaaaaccccacacccaccagcagctgtggaggagcagtgtactcgaattctcagctaggttcttccttgctccttccacagccccagggggggtctcacccaggcagcccaaggagcctttacacatgcatgcaagcgaacatactctctctctctctctcacacacacacacacgcacacacacacacgctttctcctgtatacacacattgccgattcatcaacctgataaaccagagaaaggaggcactgaaccacagcagtgagatcgcgttttcagatgctcctcctgggttctgtggagatgcccagcaggagatgtggagcaatgcctccctcactcactccaccaaagctgttccctttgtacagtggaacaccacataaaacttcctccaaagaaaaggctccagctttaaaatagaaagcaagccttggacaggtttgtctttgaggcccttccagctttaatattctatgtgtctacagccagcagggctcaacctcctgcaccacctcaaactgatgaccacttcctgctccttgaaatgcccttctccctggacttccaggatgctgtatggctcttatttcattgcctcttgccttttttctaccctcaatgttgacctccccaggtctacaccctcctctttaagaggccctctcctgcaggatccctcccagggtcactgcttccacctttatctctttttttcttttttcagacggagtctcactctgtcgcccaggctggaatgcagtggcgcgatctcggctcactgcagtctccgcctcccagcttcaagcaattctcctgcctcagcctcccaaatagctgggactacaggcacacaccaccacgcccagctagtttttttattttattttatttttttatttttagtagagatggggtttcaccatgttagccaggatggtctcgatctcctgacctcttgatcctcccgcttcagcctcccaaagtgctgggattacaggcgtgggccactgcgcccggccctaccttcatctcttgagctctgtagccatccattttcagctgactgacttttctccacctgatgttctaccagaaccttaaatcccacctataacaagccaagttcatcatccttcccgctgaactgtttcctcctctggactttacatgaatgaccacacacccatcccagagggcagtgtcaccccagaactcctcatcagctcccacatcacagatctctctccctcctctttccctcgcctgacgccccctccccagttcaagctggtaccctccatctggtccttctccctcctggtgctccccaggttagtttagatttcacaatgaagcccaactcacatttctgatgggttccctcagtcctgtggggtccttgctccaaatccttcattgctacccattgctctcaaggccttctggggtgcagtcccaacctactctcctggcccatctattatgaccccccacagccctgtgttcagtccagctagtctcccatccacacccagcaccgcctctgtctcctgctgtgacttcactgcctggtggaaatccctccctccatctgttggccagaattcagctcaagctcagcacttacctcacatgtcatgagctccacggaaagttttgtgaactccatttaggtttttacaaatcaatttttgaaaaatattttccaggaaagtttgaagccatctcttgttctaaaataatcttttaattatacaagggtagttgtctggtctgactctttctgtgacccagaggcaggggtaaggaagaaacaccacgccttgggaacattataccagccacttccgggagcgcaacaatcagtttgctcaaggtgtatttgcagctgccttatttttttctggaataagcttaggcactggtaaataaatattcatttgcctggaggcagagttgtctggttctgaaggtgaataggtttgtgttccaatctcagggactcagggaagtcccctcatagcttagtttgttcctttgtggcagggggttatgattccaccttgtagggtgaaggtggggatttaatgagagaatcattccaagagcatctgatgggacccctaacatgtggtcattcagcaactgtgggatcccttcccgcctggaacagggctgctctggagacatttccatagcgatttcttgtgtatgtcatctcttttccgaactggaataaaagctttctttagtcctctcatgccatggtacccacgaattccaatcttatggctggctgccagtacaaaggaggagcccggagaagcataaatgtgaagctgacaccagagatttaatttctccctatgaatttgcttagcagacagctttccactaacgcaggcagggactcagctgagggagtaggactgagtccagcgataacccgggggcttcgcctcagtgagtggccgctgggtgaaccgagatggaagaacacggtaggagggctagtgcagaaaacaagggcctgcttgcttcttcacctgccccgggggatcaagcctaatggtgacactggaggatttgaccctgacgtggcgtgggtccctcccctctgtcttctaggccgtgtgcagaacaaacggcttctactcgctccacgtgcagagctggtttggcctccacaagaccctgcagcctctggtgaagcgggtctgcgacactgaccgcctggcctgcagcaagacctgcttgaactcggctgacattggcttcgtcatcgacggctccagcagtgtggggacgggcaacttccgcaccgtcctccagtttgtgaccaacctcaccaaagagtttgagatttccgacacggacacgcgcatcggggccgtgcagtacacctacgaacagcggctggagtttgggttcgacaagtacagcagcaagcctgacatcctcaacgccatcaagagggtgggctactggagtggtggcaccagcacgggggctgccatcaacttcgccctggagcagctcttcaagaagtccaagcccaacaagaggaagttaatgatcctcatcaccgacgggaggtcctacgacgacgtccggatcccagccatggctgcccatctgaagggtaagctgggcttgccaagcagcctggtgctgaggctgctttctggggcttggtgggccagtgggacaaggaaggtattgtctttttatgcattggttttttctgcgacttaataaaaatgttcaaagccgcagggagggcattaggggtagaaacactgcaagcccctctgagtagggagaaggaacaaggatggggcagcaaggtggtctcctaagtgtcattacaaacccatggcctgtggatgactgggcgcattaaccctttctttacatcctgcaccctgaggcatttcccacaagagcatgatacattaaaagggaatttgactcatcactttacctctattaaaaacaccaaacctccatctctattgaatatgtcaaattgtactggtacttagaccaccaacttgtgttagtaacttttatttatttatttatttattttgagacagaatctcactcagtcgtccaggctgtagtgcaacggtgccatctccaatcactgcaacctctgcctcccaggttgaagcaattctcctgcctcagcctcccaagtagctgggattacaggcatgtgccaccacacccggctaatttttgtatttttagtagagatgggatttcgccatgttggtcacgatggtctcgaactcctgacaggtgatcctcctgccttggcctcccaaagtgccagaattacagtagtgagtcaccatgcctagccatgtactggtaccttttaaggaaaaataatgtttttaaagacaagtactttttctgtaagcaactgttaaccagattcgtggggcttcagggaaacctgaaaggaatttcgattcaaaatatttaaagagaccaggcatggtggtgcacgcctattatcccagctactcggcaggctgaggtgggaggattacttgagccctggagttggaggctgcagtgatctatgattgcaccaccacactccagcctgggcaacagagcaagatcctgtctcaaaaaaaaaaaaaaaaaagggccaggcacaatggcccacgcctgtgatcccagcactttgggaggctgaggcgggcggatcacccgaggttgggagttcgagactagcctgaccaacatgcagaaaccccgtcgctactaaaaatacaaaattggccaggcaaggaggcacacgcctgtaatcccagctactcaggaggctgaggcaggagaattgcttgaaccccagaggtggagtttgctggtgagccgagatcgtgccattgcactccagcctgggcaacaagagcaaaactctgtctcaaaaaaataaaatgttcaaagagctatgtccacataaaaatttctaagagggcaacaaaattttaaaatatgaaaaatgagcaaaatatgtctgtaaatgtttagaaaatcagccacgtttatgcctttattgcagaatttatgtataatcactgatccaaaaagtgtcataagttatcaagaacataaacagcctggagaaaaccccaagtgataataataatactactactaataaaagtaaaccaagtagtcaatgaacaccaatgccctgtagacaaatatgaatatacacaactcactcagtgctgtggttgttatttcttcttctgtgcctaaatttttttttttttttttctgaggcagtgtcttgctctgtcacccagactggagtgcagtagcacgatctctactcattgcaacctctgcctcccggattcaagcgattcttctggctcagcctcccgagtagctgggattacaggcacacaccaccacgcccagctaatttttgtatttttggtagagacagggtttcaccgcattggccaggcttttcttgaactcctgacctatagccatccacctacctcagcttcccaaagtgctgggatcacaggcatgagccactgcacctggcttctgtgcctacatttaatttcagttatttggcaggattttctgaatggttgaaagctactttcatttcttcctaaaacaagccttaatgaatcaacaatgctggttcctagaatccaaagtagccagagacggggttcaggcagagtcttcccggtgacttaccctttatggagcctgtagggcaccctcataatggtgggatggctggtggcctgcatgccaacaatcacaaggtccaccaggctcatatcagcagattgaagacggattaaggctcagaagcaactggcccaaactcctagattgaatgggcagagccagatgggccagctttgacggcaagcccaaggctctcctgctttctccaaacatctgtccccagtttgtgctcagctacatcatcacttttttttctagatgtacgtcttttgggcctcaatcagagggtatccttggcctactcatcaggaaaaatgaagactgagggaaatggctgaggtgctgtcagcgcagccttaatgaactaggaccaaaatatgcaaattacctggaggcagattcttactcagcttaacactgagatttgtctgcaaatgtaatgagcattgtgttcctgggagtatccaagtcaaggctgggtgaccatctgttagaattgccagtaggagattctgtacaacaagagtggacttgggatctggaaaactaaatttattttcttttttttctttctttcttttttttttttttcttttgagacggagtttcgctctggttgcccaggctggagtgcaatggcacaaccttggctcattgcaacctccgcctcctgggttcaggcgattctcctgcctcagtctcccgagtagctggaattacaggaacctgccaccacacccagctaattttttttgtatttttagtggagacggagtttcaccatgttggctaggctggtcttgaactcctaacctcaggtgatccacccacctcagcctcccgaagtgctgggattacaggtgtgagccaccacgcctggcccggagagctaaatttctaatactgtttgcgtagttttttaagggcaacctctccatctttgagcgggaaggagggcttagactgtctaaacccagctctgcagcaaagctgctctcactgacacctggcagcactttaaagcccaaagctggctccttccaatctagacaatgttccgagaaaagaaactggaggagggagaaaggggactggcagcttaaatgcaatttaatggaccacaatcaaaaagcagcttaggtcagagccacgtgaggtatgcacggctctcccaggcacccagaagatgctggaaatagtgacaacactgtgggggactcggggggaggtgccagggcaggaaggctacatccaggctctgccctctgtttcatggccattttgcttaccctactcagaccagcctgaaggtggcgcgagaataggctattgtagagtaaggtcaagcacctgctgaccagctgtccacaacccaaatcaagacccaccaccccgggcagtctcccagttttcccactaagattggatgccttatctctgaatcccatcctctcctccctgggtcatcttctccccactgcaatccaacacctgcagtcttattttactccttcccatttgcacctagacatgctccagttcctccctccctataaataaaacattttctgtgactccatgttctgctccagttaccacctactgactccctttcacagccaaacttcaggaaaggagatgctgaccccacatgctcacttctttttcagtctcaactcacagtagttcatttggtttctttggcatcttcttccctgaaactgttctcaccaaactaccagtgtcttggttttgttttttcttcttctttttttttttttttttgagatggagtctcgctctgtcacccaggctggagtgcagcggtgccatctcggctcactgcaaccttatgcctctgaggttcaagtgattctcctgtctcagcctcccgagtagctgggactacaggcatgtgccaccacccctggctaattttttgcaaaaaaaaaaaaaaaaaaaataggattttttgtgacctcgtgatccacccacctcagcctcccaaagtgctgggattacaggcatgcgccaccgcacccagcctgtttttgcttttttaaaaatccaatgaggccaggcacggtggctcatgcctgtaatcccagcactttgggaggccgaggcaggaggatcacttgaggtcaggagttcgagaccagcctggcaaacatggtgaaaccctgtctctactaaaaatacaaaaattagccaggtgcagtggcacatgctgtaatcctagctactcgggaggctgaggcacaaaaatctcttgaacctgggaagcggaggttgcagtgagtggaggtcacaccattgcactctagtctgggtgacagagtgagattctgtctcaaacaaacaaacaaaaacccattgagcactttttcatgttcatcttacatgactgccctgtagcacccaacagtgttggacacccctttctttatcttggaagcctttcttcatcacaatgttggaacacatgctggggaccatctctctggcacctttggcaagggttcctgcactggaaatgaggttggattcaatggtttgtaaagtcaccctcaagcctaaagtgattccattccactgttttagtttaaaagatcttgaaccagcttttgatggcatttaaggctctctcagattttgcttggctcttcccactggtagagcaggcatgtgtcatgtattctgatctgcatggccccaaaagtttcacttgtcccaaaatatcttcccctcttctattcccaaacatgaaattcttaccatgttatttactccattttgttcattgtttcctaaaatactataaactcctgagataacaattatataaacgttgttactgttggcatagagtgtatgctcaaaggcatttattgagtgaataaatgaatggccatacttagtctttattctggaaacctagaggcctgtagcgtatttttggttttgttttgtttgggcatatttctgattttggatttggctgtgccaacagggccacaagaagagagagattctttagcagcacctttacttggggacatttgttcatctaacctttgtccccacaggagtgatcacctatgcgataggcgttgcctgggctgcccaagaggagctagaagtcattgccactcaccccgccagagaccactccttctttgtggacgagtttgacaacctccatcagtatgtccccaggatcatccagaacatttgtacagagttcaactcacagcctcggaactgaattcagagcaggcagagcaccagcaagtgctgctttactaactgacgtgttggaccaccccaccgcttaatggggcacgcacggtgcatcaagtcttgggcagggcatggagaaacaaatgtcttgttattattctttgccatcatgctttttcatattccaaaacttggagttacaaagatgatcacaaacgtatagaatgagccaaaaggctacatcatgttgagggtgctggagattttacattttgacaattgttttcaaaataaatgttcggaatacagtgcagcccttacgacaggcttacgtagagcttttgtgagatttttaagttgttatttctgattagaactctgtaaccctcagcaagtttcatttttgtcatgacaatgtaggaattgctgaattaaatgtttagaaggatgacatgca

SEQ ID NO: 1228 - DNA, 4264 bp, Homo sapiens
ggcagacactctggaggagggctctgcctccccgacatctccagactacagcctggacagccctggccctgagaagatggcgctggccttttctgagcaagaggagcatgaacttccggtgctcagccgccaggcatcaacaggtgagtaggggatgcgggggacacctgccgaatctggaggaaaggactgggttacagccgtgctggtggcacactgtctgggcggggggtaagagaaatgaatgcttactctttgcctgctgggaacattctcagtcctcttcacattaaatcttctcaacaacctcatggggccagtactgttatccttgctttattgatgtggaaacagggtcttagggaggttaagtgacttgcccaagatgacccagtcttgaactcagatgtaccgtagaggaacttccacttgctatcctcaggccccggagaggcccacgggcagaggaagagtctcagtcaccctcttggaccagcccgtccccacctttccaaggggagctagaggctacagatccctgggcctctgatgccccagtcgggggtgggcgtatgaggtctccagctgtgaagagtcagcctcttgaccctagaccatagttgctgggctcagggcatcacctggcatcttctagaagtccatgggacaggacaagaggtgccagcagggaactcgtccaggcaggggctttgggttctgcagccccattcagcaccgcctttcttgcccctcaagtccactccaagtttcctgctttctctgcctccacagacacttccctgcccccgactgaaaatcattcaaaatgcccactactctgtacttcccagggagaaggagcccaactgagtttctatgtgacattgtaactacacattgagttaagcagggaaagtcaaatatgaatgcagggcatagcttcctgggtggagggagcgttggagtgggtatcagggaacatggagtctaatggactgactcagtgctgccagttataaaatgagaagccttgagcagttcacttggtctgtgtgacctcagatttccgcatctgttcattggagtgttggcccagttgttctctagaggccctcctaatttgcccattctttggtcagtgagccatttctcctcccattgccaactcttttcatgtccaagggcccagaggtgaagccgtgctcctggtcggtagccaagggggtggttcagaatcccttctgcagtgtaaagcttgccagagcccagctgccttcccggtgtatacccttgggatttctaggcaggtcccctggaaggcacctgctaggcactgtctcagctgttctaggacaaaggtgagcctcctccctgccccatctcctgcaggcagtgagctctgcagccccagcccaggttctggcagcttcggggaggaaccacctgccccccagtacacagggcctttctgtggccgggcacgagtccacaccgacttcactcccagcccctatgaccacgactcgctgaaactgcaggtaagatcagcatccgggcttctctggagcctggcaggctgtgcccaaaaaggaagctggactgaaccaggctatgacagtgtcagtggaggccaaggccccccatatcctctctcccttgctcccttctcctctcctctcccccaacagaaaggagatgtgatccagatcattgaaaagccacctgtgggcacgtggctgggcctactcaatggcaaggtgggctctttcaaattcatctatgtggatgtgctgcccgaggaggccgtggggcatgcccgccccagccgccgacagagcaagggcaagaggcccaagcctaagaccctgcatgagctgctggagcgcatcggcctggaggtttgagcttggtcctcactagtatctagtatcagggaggcacaactgccccagggatggggaccaggaaatgacagctatgcgtagttggggaggacctaggcaggggtggctggtaagcagctgtgccgatggcctgcctctgcctacaggagcacacatccaccctcctgctcaatggctaccagacactggaagacttcaaagagctgcgagaaacacacctcaatgagctgaacatcatggatccacagcaccgggccaagctgctcacggccgccgagctgctgctggactatgacagtgagtggctttaggagcggcctggtgagggtgtgtgcccaccggcattccagggaggggaggcttgccctggccttgccttctgtccacgctctgccctaggactgctctgcagtggaaaggtactttccacttgaattagaatttcagggaaagtgtacgggagaaaggagttgtagggatgattgggcccaacctcctttggatcaaaggggacccttaaggccaaagaaggcaaagccttacttgaggcctcaaagctgagtaataacagagccaggattcaagcccactgcctggctccagcttagtgctaaagaagtgtgagctcctggactgcagagctggcctggaaacaactcctaccagcttctaagctggaagcagtgaggagaggggcagggcggtggcaggtgcccagaaggagagactgcctatggtgtatttcccaaggtccctacctccacccccatattctgtctccctctctcgtccctggcagctggcagtgaggaggctgaagagggcgccgagagcagccaggagccagtggcacacacagtgtcggaacccaaggtggacatcccgcgcgactcaggctgctttgagggctcggagagcgggcgcgatgacgcagagctggcaggcactgaggagcagctgcaaggcctctccctggccggggcaccttgaggtggcggtggcaataggccaaggctgggacccagctgcaaaggctgtaggagtgggcccagcctcccgtggtggcccaggccctgaggactggcactgagcctggccctgcttccccagggacacttagggccacagaggccaggccagggccctacaggttccaggctcagctggagtggttggggagtcgcccaagggcacatcccacctgcctgagccccgccctccaccagcgactgacagcgcagcccctcctggcaccaactgctcccctgccatggccacggccacagcaagtggggcactgggaaaccctgcccatgtccctcaccaacaaggcctccaaatcctcctcacccccacaccacctacccctgtcgcactgctcctgaaaagggggccaagtcaatgtttcaggtcagtctaaaaaccctagggaagctggccatttaaaagaacccaaactgaccatgggtaaatccagttcccctaaataaggcctgaagaaatccacaggtaccattcccactttccttctccctagctttcttagaggtttggccactaaatcttatgagacttgaaccaagtggcttcctctttctaggcttaggacgggttggggttagaaagggtgatcactgaaggccttgcctgctctgacattctgtgacattaaatgtctattctcctgttacctgtggcctgggacaccagtggggtttatcgaggggaccagaggggcctcaggctttcagatgaaatggctcctcctactcacccactttattcctctccatgtaattcaggacaagctgcaacttcccccagcttaacacaatgcccatacctcatacgatatgcgccctcccgttccatccctggccccctcaaacgagacttctcacaaggctgattacagatggtcaaacctggcttccaaggacagaattgcctctcggaagccagctgtggatctgagtccagagttggccacttgtgtgggtcctcacaagcaaagagagcactaaacttgacattgggggtccaccactccaactttgctttctgaaggttttggtgtacattgagccccagaaggaaaggagagtatctgtgagtgggggcctcccttgaccccagtacgaagtctatgccctgaatccccagagtagcccttcctggtgcccaactggcctggggacaaacagcgtccactacatctaggactgccggctaagtggacacacttcttgacctcctaccaggaactttggtaaaagctagctttggggaaggggttgggtgtaaatatgagagggtggagggagaccagctggtagcaataaacatgggtagaactaaat

SEQ ID NO: 1229 - DNA, 499 bp, Homo sapiens
ctcaaagccccaagggtactgaataattgcagtcatttaaggagcacctccacttgtgccaggcactgagcactttacatatagcatctcctgtaatcctcacagtgtccccctgaggtgggtgccctcatcatcccagtttacagaggaggaaactgagggttggggaggttgaagaagttgactagaaagtaacagagcaggagtcttcctgactgcagaacccatgttcttaactcctatgctacaatgcttctccaaaggcctcatccaacaagcattcaaaagtcctgggcactttggagggcaagctgactctctgacccagccatttcccttctagaatttaatcagccacataagtgcagaaacagccacataagtgcacaaatacctatggacaaagatatctacaacagctctgtctgtaatagtaaaaaattgaaaacaatgcaaatggggaattaaatgctttatggtttgttcatataccacgcag

SEQ ID NO: 1230 - DNA, 145 bp, Homo sapiens
acagaggttacagtgtgccaagatcgtgccactgcactccagcctgggcaacagagcaagactctgtctcaaaaaaagaaagaaagaaagaaagaaagaaagaaagaaagaaagaaagaaagaaagaaagaaagaaagaaagaga

SEQ ID NO: 1231 - DNA, 3970 bp, Homo sapiens
gaaaaagggtaacaacccggaaagtagactcaccgtcttggtctagagactgacccctgcacagacagaccccttcccctctctgcgaaaggaccaagccccagaagtcactccatctcctacggctcgcaatttccagaggccccctggcaccttccagcctgatgtcgtgcgtcaagttatggtgagtagggagtggcatgtcgatcgcagcctccgacattcacacccagagagccccacagactcgctcagagaacgtctttgagtccggggacggtgggggccggcgagggaggctggggattgcagtgagaacgccgagtcacaggggcgcggggagcagcgctgaggcacggcacggccggctagtgggcgacacccctctctcaggcccagcggtgcccccgcccccttggtgtccatcgaggaactggagaaccaggagctcgtcggcaaaggcgggttcggcacagtgttccgggcgcaacataggaagtggggctacgatgtggcggtcaagatcgtaaactcgtgagtgaccccggttgaccccagccgcaatctggccaaaaaggtggagccactgtgctctggggcctgaatggcgaagggagggattttcccacgaccccggtgcgactccagctctctcctggagtgtaggaaggcgatatccagggaggtcaaggccatggcaagtctggataacgaattcgtgctgcgcctagaaggggttatcgagaaggtgaactgggaccaagatcccaagccggctctggtgactaaattcatggagaacggctccttgtcggggctgctgcagtcccagtgccctcggccctggccgctcctttgccgcctgctgaaagaagtggtgcttgggatgttttacctgcacgaccagaacccggtgctcctgcaccgggacctcaagccatccaacgtcctgctggacccagagctgcacgtcaaggtcagctggtctacacccctctcagcctcaagacaaggccccagagctgctccagccaggcccgccggacactagacctccagagccctgtctattgaataggcgtagcctctctctctggacacagggctgccaggggacaaagcccagccaggagttttagctcctgcctaccaggtgatagaggccctgagccacacgagtcatttccaccagctgccccaccagcccctccaaagagtcatggctgacccagccctggagactcagaccttgacctagccctaccacaaggcacctagatctaccatccaagggaacctcttcccttgacctccacactccctttacaaagctgaacctgcaccttctgggggcaggggggttcctggaggctctctggcccccttgtcttccctacctcccacttctttccttcctttgcagctggcagattttggcctgtccacatttcagggaggctcacagtcagggacagggtccggggagccagggggcaccctgggctacttggccccagaactgtttgttaacgtaaaccggaaggcctccacagccagtgacgtctacaggtaaggatcccggcccaaacacacagccaggattcctacacttctctgggccctcccaggggatgatgtataggaaaggagtcttgccagtgattggaccgatcctcagctttgtgtctcctgcagcttcgggatcctaatgtgggcagtgcttgctggaagagaagttgagtgtaagactctaggaggattctgggatccttaaccccaggtgcccttctcttgaaagccccaaggcttccccttcccgctcacctacttagactgccctcctccctcctcgtgcccccacattacactccctgcctctttccatgatgaagcagataattcccttttaccctgaatgccttctcttctcaccctcctcccctactccagtgccaaccgaaccatcactcgtgtacgaagcagtgtgcaacaggcagaaccggccttcattggctgagctgccccaagccgggcctgagactcccggcttagaaggactgaaggagctaatgcagctctgctggagcagtgagcccaaggacagaccctccttccagggtgagctggccagttagctggatctaggataagcttgggtctgtcagcagggggcttttctcaggaaaagaagatttgctcacctgcactccactctgctgtccctctagaatgcctaccaaaaactgatgaagtcttccagatggtggagaacaatatgaatgctgctgtctccacggtgagtgccaacatcacccctccccaggagctggtcagggatggcacagcgtggctacctggccatccaatgactcaccactgaccactgctttttatgccttgacctttgtacccaccgtccccagcccacccctgagttcccagacaacagattatggaccgagagactactcccttgggtttactctggctcatccaagtcatacccagcaaactcctcccatccctgcaggtaaaggatttcctgtctcagctcaggagcagcaataggagattttctatcccagagtcaggccaaggagggacagaaatggatggctttaggagaaccatagaaaaccagcactctcgtaatgatgtcatggtttctgagtggctaaacaaactgaatctagaggagcctcccagctctgttcctaaaaaatgcccgagccttaccaagaggagcagggcacaagaggagcaggttccacaagcctggacagcaggcacatcttcagattcgatggcccaacctccccagactccagagacctcaactttcagaaaccagatgcccagccctacctcaactggaacaccaagtcctggaccccgagggaatcaggtgagacattgacaggattaggggatgcactaagagtcctataaatgctgtccccttgccagcgaaaacttggggctgagaggagtgcagtgggagtgccaggctccagggcagaactggatgctctgtgctgtttgcagggggctgagagacaaggcatgaactggtcctgcaggaccccggagccaaatccagtaacaggtacccattctctacctctttcttttccctgttcaattcttccaccagactcctcctccagacctatatctagattcagggtactttgtggaggggaggggagaagatgatctaactcaaccttctcatttcataaatgggaaaaccgacaccccctgagaaaggagccctctgaggtcacacaacaaagcttggatttgtccctgaatcttctaactttccacaacaccagctctgtgagccccctaagttccattgtttcagcagtccagaggacctcccagcaaaaaagatcagggtctcaaatgtcaattgccactctctagagcttctgctaacacaattctggagaggagctctgaggggaggagcacagggcacaccttgacacagccactgacaagtagagacttcatactccccacccacccccaacttggcctttctgacagctaaaccctcctgccaccatcactatttctcttaaagggcgaccgctcgttaacatatacaactgctctggggtgcaagttggagacaacaactacttgactatgcaacagacaactgccttgcccacatggggcttggcaccttcgggcaaggggaggggcttgcagcaccccccaccagtaggttcgcaagaaggccctaaagatcctgaagcctggagcaggccacagggttggtataatcatagcgggaaataaagcaccttccaagcttgcctccaagagttacgagttaaggaagagtgccaccccttgaggcccctgacttccttctagggcagtctggcctgcccacaaactgactttgtgacctgtcccccaggagtcaataaacatgatggaatgctagtca

SEQ ID NO: 1232 - DNA, 2811 bp, Homo sapiens
cgagcgtgactccgccatcaggtccccggctccctccccggacctagcccactccgctgcgccagcgccgcgggcagtgagttcggggatcaggggaacccggggctccctcgcaccaaccccaaatcctgccctcctggcgatgaggcttttctagggcacctctacaatccgggtttgagggaggaggaggaaaggactgagggatcccctcatcgccagctgggagcgggctgggaggccgcagggagggcctgaaaaaggagacgggattgccacgaggttgggggcgcggggtggtagcggctttgagcgggtgagaaaagctcaggtggggcccgccgggccgaaggaggtaacccggcgcccggccctagccagccccggggctcggggctggggagatcatggcccgcctcttcagcccccggccgccccccagcgaagacctcttctacgagacctactacagcctgagccagcagtacccgctgctgctgctgctgctggggatcgtgctctgtgcgctcgcggcgctgctcgcagtggcctgggccagcggcagggtgagccgagcctctgctgcgggagggtctctacctggggagcattttcggggttggggtttgtggggtcttcttttcgatgtgttttcgttgctgggagcagagaaagaaaggaccattgagcctggctaggaactgcagtgaccctgggcaagtcactctacccttctgggtctgctcagggagaaagctgagtcctggatgcttctcgtttctgtccgggttctgacagactttatgaacatccgtggtctacgggttctacaataaatccatcaccggattttccagttttccaaaggggaaattctaggaggcccctggggaattcatttcctgcctttctctccctcttaggggatgtagagcagttgtacccacagactcccagaaggcaccctccaccgggctctcactgagtcccaaagtaaacccatgtccagtttctgtttggggaggaagaaggtcttcaatccaattctagaaatggcctgcccctggttttcttttcactgcttggaggcaaggtgggaaaatcaccgggcgcggccaatccttgctggtccacgcctaaatccgggaagaggtggggacaaaatgctgggacggctgtgcagcttctgcttggagttgaggcaggtggcgagatcgcagccctggtggccagggaggtgcgggacgccgcgggtcctggcgccccctgctgctcgagcgctgcctcgcgccgcccttcaagctgccggccgcggtccccggctccgggaatctcccgagcaaattggccagatttggagacattcattccgaagtgcctccttgtgagcttggatctatctttcacttgcttcatgacgctttggttcccgtttgacagataagaaaactgaggctcagaaacaaataggggatgggagccagatcttctgggtagctgtcccagcaagataataggttggacaacaggaggctgggcgctgtggctcacgcctgtaatcccagcactttgggaggccaaggcgggagatcgtttgagcccaggagctcgagaccagcctgggcaacttggcgagaccctgtcttctactaaaaatacaaaaaaaaaaaaattagctgggcgtggtggcgggagcctgtaatcccagctactcgggaggctgaggcatgagaatcacttgaacccgggaggcagaggttgcagtaagccgagatcgcgccactgaactccagcctgggcgacagagcaagactctgtctcaaaaaacaaaccaaccaaccaacaaaaaccatacgagactgctgagtctagataaaagcagtaggacacaagcaatttcaaatggttcaacctaaagtgaatggcaagcggaggtgccttgcctccttttcgtacttaggcttgagacacctttcagaactgggctgaggggctgggctgctggcttttcctttatcaggttcgttccttctccctgtcacaatcttgcctcacacacccctgcccacaggagctgacctcagacccgagcttcctgaccactgtgctgtgcgcgctgggcggcttctcgctgctgctgggcctcgcttcccgggagcagcgactgcagcgctggacgcgtcccctgtccggcttggtatgggtcgcgctgctagcgctaggccacgccttcctgttcaccgggggcgtggtgagcgcctgggaccaggtgagaggggcggcaggcggggcagcggggacggcccgggcttcgatccctcaccaggccttgaatagccccacttgggccttcggcttcccgcgccccgcccccaggtgtcctattttctcttcgtcatcttcacggcgtatgccatgctgcccttgggcatgcgggacgccgccgtcgcgggcctcgcctcctcactctcgcatctgctggtcctcgggctgtatcttgggccacagccggactcacggcctgcactgctgccgcaggtgagcacgcaagtagcacaggctgcgctcaggacggctctgccacgtgctagtaggctccttttagggggttgttgagctgtgactccaagtcaaggtgcaacgctgggcgcaggatacccaaccgtgctttcgcagagctggtacaacagtgtgatgcaatgcctgctgttaccagaagagggatccaggccacacggaagggagtcgtgtcgtggtttaccccggggacaacagatgtggttaatgaaaccttgacagagaatgaaaaaa

SEQ ID NO: 1233 - DNA, 32195 bp, Homo sapiens
ggaccccggtgtctggcttcccccgagccgggaccccgcgatggccaagcgcagctcgctgtacatccgcatcgtggaggggaagaaccttcccgccaaggacatgtgagcgcggccgggggtgggagccccaactttccggggaggggcactgccccccaggacgcctgacctttccggggtccacccacaagagcagcggagagggtgcgggagtgcggccgtggtgggggatcggcggggaaaatggggacagtgacattttctgcgagcaccagacggggtgacaaccggggggcggggaagtgtcaccgagggctgggggctgggaactagggagggggcgagaatttgtcagcgatccgcggctcacgaggggaaggggctttgatacgacaggagctggagcctggtgacatgccaggggagacgtcttggtgatctgcccccggggtggggttggagggggtggggtgtcccccgcaaaggaagggtcttcctcagtagttccagagcccttaatgccccggagtgtgcacctgaagcacatgctggggcccaggggctgtccccgggcttcctgctgtgcactcgggtaggagggactggcatgaaaagtgagaacaggtcaggaggccaggacaggtgcaggactgtgggggagggaaggagggtagtaactgtcgcttgtgccttgggctttacacctgagccatcccgttaatcctctcaaccaccccgaaaggcagttctcaccgttccattttacagatgagaaaactgaggttcagagaagtgaaatgctggctccaagtggcaggcagagcagggtcttgagtctagggcttctcacaggcactgacatctggggattcccctggtccctggctcgatttggggaggtttcaggggccccttgttccactcttctcagtaggtcccagggctgagctgcctgacccctggcccaccatcttggtcttgccaccaccttcctcatgtacagggtttaggcagctccctgctcctagagcctcagtttcccctctttaaactaggggttgaaatccctctagaggaagagggggaaagctcaaaggtcaaggggcactggctgcctggaggaggagggtgggagggggaaaagtggagcctggaggaaacagagtccaaagtctgcggagctgcagttccccaccccttgggcgccccgggctcctggatgcagagaagtggctagcatgggcgagggggtggagcagggtggggggcaggcactctgctcacacatatgtgtggtggcccctgtgagcttcccagcaagctcagcgcgccaccaccgagagcagtgccagttccaggccccctgggtctgatgaggcccagctcagcagttaccatgacaatggggaagggagggcggtgggcatccctaggtgggtttctgtgcttggaggcttggagggaggtggagtgggagctggcagtgaggtctgtgggctgggaaggcagaggagctctgagaagggtctcagcctccaggcccagcctttaagcatcccccaccccctgccaccactggcactaggaactaggtcatcttggcctcttctggctggtggcagctgggaggagcagcccctccgtctgtcgcctccctcctcatccccacagcagctggccctagtgcctggctccaggctctctccagcccagggcagccaagctcttggagtatgcccacctgggagcccagtgcctggttccctgctcagtgctttgcctctgggcaaaggggttccatctacagtggaggggtgccttgggatctcgatcctcaccctgcccccctgcctgccctactcacgtctcctttgcaaccccccatcttcccctgtggcttgcatacacagctctgacctgtcagccgcctcttaaaccatcccataaacagtccctcacatttgggctactacccttcacatctctgctttcgcccatgtgtggggacttctgccttcaagcactccacttcagtcctccagaaaactcctattcaatgttcaggactcctctcaaacttctcctctccagggcattccctggtgcacttgggcagagttcctggctcctgggctcgccccccagcactctgggtggcaggaggaagcccctggtgtggcagttcctccgtcaagtggtgcctgtcccagctgactgtgagggcagggactgtgactcattcatcctggcaccgggtccatagtagggagaataagaggtgttgaggacttcccccacttaatcctcttcttagctttataagatagacatcctcggtttgcacattgggaaactgaggctcaggaagtgaaagccatttgccaagagggtaggtagagaagtcaggattcagattgcctttgctgccgacaggctgagaattctagcctgcccgcggctgtaagcttgcggctgggctcagtgagactgagcctcggaaatcctatgcaaagcatttggctgcagagtcgggcaggggtttggagatcatgggaggccctcactgagtactggagtttcactgtgcctcaccagcaccccgcctatcttctgagtagcatctcctccagccagggcttgcatacttctgaggacggggagcttaccacctctcatagtggctcatcttgactgagacagttccaaggaggaagctgtcctcacacagctgccagctgccttcctgccacttctactcatgggtttttattcctctaaagggcacagagcgcagctgcattccccatcactgctagctttcagagcctgcctgttcctgccctgcctcttcccactgtctctcgtccccacgtacctaggcatgagccaagtctcacgatgaccagtgacccactgcctcccacaccaagtggccttggggactggcccaaggctattttggggttttccctgatcctcctccttccacagcctagaaactgccaaggccctaaatatagaggccccgaaagtagccagacaggccagtggcaactggctcgggaaaggagaaatgagagaggtgggcagcctaggggcctcaacactagcgaagaaggaactgggcagggcttgggtcccagcagcccactggggaccatggttgggcccaggtccttaaatctggcctcggcctgctctcaataccgtcctcttgccccacctctgatccagccacccggctcttcatagtccttgcacaccaggactcgggtcctgcttccaggcctttggaagcagtagcagcccagtagtgggggacagcccacggaggtcccctgttgcctcagtcagtactgacctctccctgcctcctctgagctccttgtatggctcctggatcctgcagcccagcccagcacctggggtgttcagaggcctgatttcttagcacctggagtcccctggctttgggttgatgggatgcaagctggggtattcacagggggctccctggaggtgggggggctctttattttattttatttatttctgagacagagtcttgctctgttgcccaggctggagtgcagtggcgcgatcttggttcactgcaacctcctcctccggggttcaagggattctcctacctcagcctccccagtagctgggattacagttgtacaccaccactacattcggctaatttttgtatttttcgtagagacggggtttcaccatgttggccaggctggtctggaactcctggcctcacgtgatctgcccacctcggcctcccaaagtgctgggattacaggtgtgagccaccacacctggccaggaggcgggggctctcaaatgatggcagggggaggttacagtcagagatgcaggcagtgctaacatttactgagcacctccaagaccttctctatcgtctcaggacccagggaagctcccttgtgagccggggttacacttcccactttataggtaggaaaactgagtcttggcagacatttcctgtctgtgtccaggagcttctggagctgttggccccaaatgccttcctctgccggaagagccccttttgagaagggaagcagagcttggaattccccaccctccaccatagaaacacacttcctttttatggacactcactggaggaacagctctagagacagccctcacttccccacttttacccagtaccagccctaggcctggctgcaggcctctcccagccccaggagccccccaacacctgagacccttggaactgagcgcgtgtttgccttcccccatccctctttccccagatagctgttacatttattcattcattcactcatcagttcattcattcgtctgttcattcggcaaacactcatgggctgcctgtcttgtgccaagccctgtgggggccctggggacacaggcatgctccccgcccccaggtagctcagagcaggtgggaggcagctgatcactaccaggctggatgaagtgggcaggcagtgtgagtccagggaggccttcctccccgtcccgtcctggggcgagggagggctctggcagggctgaaggccgactgggcaggagggacagcggtgtcggtgttggggagagcaggagcaaaggctccagggagagtaaggggctcgactttggtgtggagggtaggggtcccaggagcttgcctggggctgttgcttggagctgttctggggggaggcagggatggggtaggagggcatagaaaggaggaacattctatcccctgcgggaggaacaggaggtttccagtaccccctccctctgtccctctccctcccctccctgtctttcccctctccctctctacccctccctctcaccccctccctcagtctccccctccctctttactccctccctcttactctcctccctctctccccctccctctcaccccctcactcagtctccccctccctcttactctcctccctcttactctcctccctctctccccttctctctctcccccctctctcaccccctcagtctccccctctgtcttactctccttcctcttactctcctccctctctccccctcctactctcctccctctctccccctccctcttactcttctccctctctccccctccctctcaccccttccctctcaccccctcactcagtctccccctccctcttaactccctccctcttactctcctccctctctctccccctccctatcatcccccttccctcttaacccccacctctctcctcctccctctcagccccctccctctgtctcctcttccctctctctcccctccctgtccgtccccttccctttctgcccctccctctgtccctctcccagtctctccccttcctccttccccctcctttcttctcctttctctctctacccatccctgtctcctccccctccttctccctcccccacaactctccctccatctactcccacccctgcccgcgaaaggggagccctggtgcgggttcctgcccttccctcaccatccgctcccgggctgagggcggggacccgtgtttggccggaggagcctgcggtctccaaaccaggacgcggagactcagcctccgctctcttcccccgcactcctcccgaggggccaaaagagagaggagcctgccgcgagtccccgccccgatcccgccctccagccccgcccctgcctatttgtcttgcagcactggcagcagcgacccctactgcatcgtgaaggtggacaatgagcccatcatcaggtaccgcccccacccccaggaccgaggggcgctcagcctctcatcggcccgcgctctccccgcaaaggggtgtgaattttgttgtgaattttgtacggagatgggagggggcttggagcacctggtcccctgcctgggattccccacctcgccctgacaccccagctaggagacgagaaagaccttcagggaactggcctggccaagggcctctcaccggactctgttcatctttgcaatcatcacaacctccgggagagacagatgctgacgatttgtaacaacaactctcatttgtggagccagcccttttccagcccgtttagttcttgcaattaacgagatacgatatcattagaccccatttacagacaaggaaactgaggctcagggagactaactaccctggccaaggtcacatgcctagtaaaagtggcagagccacactggagcccaagtctggccaccccagagcctgagctcccttcccctccctggtcctggctctaacttgggtcctgtcccctgagagtcccatagtaatatccctcgaggctgggcaaccccagcctgcaccctgaagagtcacttcctccggatgtcccttcctccatggtccccatgatctctgggcagggtctttgctgtcctctcccttccttcacccagactcctgcttccaagttcatggccagagctgccctactgttctgcccacctgagtgcccgtggcctactcggagcccagtccttccctacctgcaagcaggctcccagcctttctcgagggtctgcaaaccacagacagcaagagggagaggggtgtgatggctctgatgctcttgatacagaagggaaacagatgacctgtctgagaagtggttggcatgaggtggtcccctgaactttcatccgggtccttgggggcttcagcgtctccccacccgctagcccactgagtcccatgagttgaaggctctgatccaaagggggttgaccagagctgggtgaggatgtgaggccaggctcaccagtcgccctgaggcagctaccctgtgacctgaggccaatgcctgccaactgtgatctcagtttccccaaatgtaaaacagctggagaggctgggcacggtggctcacgcctgtcatcccagcactttggaagtccgaggtgggcagatcacctgaggtcaggagttcgagagcagcctggccaacagggtgaaaccctgtctctacgaaaatgacaaaattagctgggcgtggtggcaggcgtctgtaatcccagctactcaggaagctgaggcagggagaattgcttgaacttgggaggcagaggttgcagtgagccgagatgacgccactgcactctagcctgggcgacagagcgagactccgtctcaaaaaaataaaataaaataaataacagccagagagaggcagccctgtgccccatccagagcagagaggaatgtcagggggtagtgattggtggtgaacagtagggtctggcacagggaaaacacatcagtggcagagccagttgttataggggtaggggaagatacaaggaaggtcccagcccagggcctgggagtggcctgggcacatgctgagggttctctcctgcaggacagccacagtgtggaagaccctgtgccccttctggggtgaggagtaccaagtgcacctgccgcccaccttccacgctgtggctttctatgtcatggatgaggatgccctcaggtgagtgcccccctctccagctgggacccagacctggccatctgattgctccctggcccatttcaccaccaggactcctgggtcctttttggcatcctctttgcagcctggagggaggcagagcctgggggcctgggagggcgaaaagcttgagcgtgtgggtgtgcacatgcgtggctccatggtgcatgcgccacatacacacgtgtgtgtgcaggcatgcaggcacaagtgtgcatggactacacgtgtgcgtgcaggtgtgagctgtgagatgggcacccagagagtgtgagcttggcatgtgtgggcatgtgagaaacctatcacatccccctagagggtccagaacccacagcctacagaagggccacaggtccagctctgttgggttactctggaaatgacagcggtgtccaccaccctgctccccccgggggggccctgaacttggtgggaggtcccagagggcagatactgaagccctgcccagctctgcctccgtctccctcctctagccgggacgacgttatcggaaaggtctgccttacaagggacaccatagcctctcaccctaagggtaagttctcccttccctcccacactggtctgcccagtccctggcctccctcccactcggagacctcccctctaggctccgtctggtctcctgctcagggaaagccatttctactctccccagaagccggggccacgttctgtactcctggcctctgttctgcagcatgttcccaagcctggttgttactgcctcttccctagggtgaagaggggctgctatgggtggaatctgaggcctctgctggcagaagaaggggcctccttacactctattgctgaagcatagggaccccttctccaaatcaggccagctccttctgtaacccatggggtcgcctccatctgggccctagtactactgtgtcctaagtctgaagggttggcctagagccagtccaggctggagatccctttcaattatttctgggatgcagacattgttttgtgttattgtttttacaatttttatatagtttttttttaaaaaaaaggccgggcacggtggctcacacctgtaatcccagcactttgggaggccgagacgggtggatcacgaggtcaggagatcgagaccatcctggctaacacggtgaaaccccgtctctactaaaagtacaaaaaaattagctgggcgtggtggcaggcacctgtagtcctagctacttggcaggctgaagcaggagaatggcgtgaacctgggaggcagagcttgcagtaagccgagatcgcgccactgcactccagcctcagcaacggagcaagactccacctcaaaaataaataaataaataaatgaataaaaaataaaaataaaaaataaaatagaggccgggtgcagtggctcacacctataatcccagcactttgggaggccgaggcaggtggatcacctgaggtcaggagttcaagaccagcctggccaacatggcaaaactctgtctctactaaaaatacaaaaaattagctagacgtcgtggtgggcacctgtaatcccagctactcaggaggctgaggcaggagaatcgcttgaatccaggaggcggaggttgcagtgagtcaagatcacgccattgcactccaacctggatgacagagcaagactccatctccaaaagaaaaacaaagatggaggccgggcatggtggctcacacctgtaatcccagtggcaattcacttgagattaggagttcaagaccagcctcgtcaacatggtgaaaccctgtctctactaaaaatataaaaattacctgggcatggtggcactcacctgtaatcccagctactggggaggctgagacaggaaaatctcttgaacctgggaggcagaggttgcagtgagccaagattgcgccattgcactccagcctaggtgacagagcaagactctgtctcaaaaaaaaaaaaaaaatggagatgggggtctcactctgttgcccaggctggtcttgaactcctggctttgacagatcctcccgccttggcctccccaaggtgctaggattacaggtgtgaaccaccatgctctgcccagacatgattttgagggttcagccctgtgccagcctcactgtgtgtgaccttgggcagctcctgccttctctgggcttctctgagggttcaaaccagttcttggatgctatgggctctgccatcagagcctttgtgtcccgcttactggcttccccccacacacacctgctcctgtctgtgacgctgggccagggatgggggcagggcgaaggcaggttctgctgactcatggggcttcttggcccctgccaggccaaaggcctttcccacctgcagccttagccagcgtctctggggtctagtggccccagtgaggctattcctccgggtgccttgtagcttccccatccaggcctcagaccctcctcccagcagccctaggggagggccactctcttcctgttttaagatggggaatctggctgggtacagcggcccacactcataatcgcagcaccttaggaggctgaggtgggaggatggcttgaggtcaggagtttgagaccagcctgagcaacatagcaagactccatcttttttttttttttttgagatggggtcttgctctatcacccagtctggagtgcaatggcgcaatcttgtagcttctccatctgggcctcagaccctcctcccagcagccctaggggagggccactctcttcccgttttaagatggggaatctggctgggtacagcggcccacgcttataatcccagcaccttgggaggctgaggtgggaggattgcttgaggtcaggagtttgagaccagcctgagcaacatagcaagactccatcttttttttttttttttttttttttttttgagatggggtcttgctctgtcacccagtctggagtgcaatggcgcgatctgagttcaagcaattctcctgcctcagcctcctgaggagctgggattacaggcatgcgccaccacacctggctcacagggtgagaccctgtctctaaaaacaacaatgacaaaaatgacacaatagtgagggcacaggccccagtcactgacttagattctaatcccagctcttccaactgctgtttcttcacctgcggagcctcagtttccccatctgtcattggggataccagcccctgcttcacgggtgcctaggggattcccagattatggaggtgcctcaaggtgcccggtggggctgagggtggagggtatgggggttcagggccgggtccctggctgagctgaccccacaggtttcagcgggtgggcccacctgacggaggtcgaccccgatgaggaggtgcagggcgagatccacctgcggctggaagtgtggccaggggcccgggcctgccggctacgctgctctgtgctggaggccaggtgagactcaggggcctgggggcgggcagtgggtcccctgcaactagagaaacccaatgaggaagctgagccccccctcgccccacctctacctcctggtcccagagctggccacctcccatcaaagcctgctctcaagagagggtctcgccaggcacggcgtctcacacctgtaatcccagcactttgggaggccgaggcaggtggttcacctgaggccaggagttcaagaccagcctgaccaccatggtgagaccctgtctctactaaaaatacaacaattagccgggcatggtggcaggcgcctgtaatctcagctactcaggaggctgaggcaggagtcttgaacccaggaggcagaggttgcagtgagccgagatggcgccactgcactccagcctgggtgacaagtgagactgtatctcaaaaaaaataaaaaagaaagaaaaaagagagggtctggggaggttttctggacttgaagatgtttcttgggtgatttccactcaaggggatatgtcccttaagggacagtctaatgttctcatggaggaactggagccatcacagaggagtggagtagggggtacgggtgaggagaccccgaactctgatcacacagcctcagtcccccagtgctaaggccggcttcccaatgtttaacgccagtgtgaacttggcctggtgggagtgtgtgtaagtgggtccctcgtggggctgggggggtgaaaagagttgctgaaaatctcccgatgggcaaattgagggttcccccaaggagggacagtggtttggatggttccatgggcctgagtcacctgtgacagggccaccccccaacccccagggtatttttagctgcaggctgcactcccgtctgggcctgggtctgagtcacactctgtccgtgagaagcgtcttcccttccggctccaaagccacctccccaagtcgctccctgcctgtgaggcaggagggtggcccccagccaggcagccctatggagccagtgttccccccacccttgaggggtcagcctgtctaagaggaagacttcccttgggcagaggggtgtgggtcggatgatgcccatgttgctcactctggcttcccgggagttattttctgtcctgggaaaatagaaatggatggaaaatgtctgggcttgggccgagcctcagccacacccccacactcgctcactctctggcctctgccattcattcccccccgccccaccccaactcacccgcttcctccatccttatcctttccaggcaccaggctgtctgggggacaggcatgcacacgtgtgcacccgctcacacacgtggccgggctctgggacctcggggccacttctcccaggcacccatcgtcacccacggagatgggaggcatggaagcatgtctccctggccctcccctctctccaggaatctcccctgtcccatcctctggggccacagtggttggccttctagtgagtcctagcaggggagaggaatgtccaggcctctctcagagtgaggggacttgtcccccgttgtcctcggcaatgagactcctgctgcaattccaagtcagcctaagaaggtccatttgctgcggagaaagaaagaacatttcctcattttttctggggagattctcaatatttcagtaaaaccttggggtttttttgttttttgtttttgagacaatctcgctccatcatccaggctggagtgcagtggcccgatctcagctcactgcaacctccaccttctgggttcaagcaattctcctgcctcagccttcctagtagctgggattacaggtgtgcaccaccacgcccggctaattttttgtatttttagtagagacgggacttcactatgttggctaggctggtctcaaactcctgacctcaggtgatctgcctgcctcggcctcccaaagtactgggattacaggcgtgagccactgcacccgggctgtttttttttttttttggtgggtttttttttttttttttgaggcagtctggctctgtcgcccaggctggagtgcagtggcgttttcttggctcactgcaacctctgcctccccaggttcaagcaattctcctgcctcagcctccttcccaaagtgctgggattataggaatgagccgctgcacccagcctcaatgttggggttttattagacagtcttgagggggaagaaaggcaggtatgagaggcttaaaatatcaaagatgagtgggctttggtgttcttccacaaagagttctaagtaggggatactggcagggtgcagtggctcactccagtaatcccaatgctttgggaagcagaggtgggaggatctcttgaggcccagatttcgagaccagcctgggcaacagcaagatcctgtctctacaaaaaaatttaaaaattagccaggtgtggtggggcacacctatagtgccaactacttgggaggctgacgtgggaggattgcttgagcccaggaggtggaggctgcagtgggctatgattgcatcactgtactccagcctgagcaacagagcaagaccctgtttaaaaaaaaaaaagaaaagaataaaagggccaggcgcggtggctcacgcctgtaatcccagcactttgggaggccaaggcaggcggatcacctgaggtcaggagttcgacggcagcctggccaacctggtgaaaccccatctctactgaaaatacgaaaattagctgggcgtggtggcaggcacctgtaatcccagctactcaggaggctgaggcaggagaattacttgaacccaggaggcggaggttgcagtgagctaagattgcaccattacactccagcctgggcgacagagcgagactccgtctcaaaaaaaaaaaaaagctggaggtaccgtgactagactagggctgtgtaaagacccatctatggagaaagggcagggccgcccatcagggctgcacctcactcctccaccaagtagagcgacattactggcagaccttccagaagcacactctctccctaaacctgagcccagtagcgattcacttttccattttcctgatgaggaaaccgaggcttagggcagccctgggaatggagggccaggaacattgccccggcggttccctggcagcactcacaccacccccctgccacccccagagcaaggtgcagccactggcctgcagctgcctggtgggaaggacccatggcctctaccttggggggttcttggccacatgggcgatcctggggagatggctatgggagcagggcccagaaagggcagaggcgcactgtccacagtcagcttgccagggacggaatgtgcccaggccttttggcccgctgtggttacataatggtggtgacaagtgggggagggggggctcagggacaagtcgatgatccaatcttcctccacccccaccagggatctggccccaaaggaccgcaatggcacatctgaccccttcgtccgagtgcgctacaagggccggacacgggagacctcggtgaggaggccagagggcagggaaggggcagggggctcgggggacgtgccagccacgcccccattgctcacctcaccacctgctcaccatccgctggtgggacagattgggggccacagtcttacagaggaggcccagggaaaggggcgacctctctgaggggacataataggtcccaggacctctggggccaacttcgctcactcccggccatgcttgggggtaaggaggggattgagacagccggagtggggtttatttgggaacacccatgctgccttccccacccccaggaaatgtccagagtcgagggcccagtcctgggcacgaagacaccaaggtctgctttctcagtatagtcgctactgtttttgttttgtgtttcgtggtgttttttttttttgaggccaagtcccaccctgtcacccaggctggagtgcagtggctggatctcagctcactgcaggctctgccttcccagttcgagagattctcctgcctcagccacacgagtagctaggattacaggcacacaccaccacaccaggctaatttcttgtatttttagtagagatggggtgtcaccatgttggccaggctggtctcgaactcctggcctcaagtgatcctcccgcctcggcttcccaaagtgctgggattacaggcatgagccaccacgcccagccctgtgttttttgtttgttttgctctgtttttaaatattttatttccacaggttattggggaacaggtggtgtttggttacataagttcttagtggtgatttatgagattttggttcacccatcacccgagcagtatacactgcacccaatttgtagtcttttatccctcacccccttcccacccttcccccccgagtccccaaagtccactgtgtcattgttatgcctttgcgtcctcatagcttagctcccacatatgagtgagaacataacgatgtttggttttccattcctgagttactacacttagaataatagtctccaatccaatccaggttgctgtgaatgccattaattcattccttttttatggctgagtagcattccatcgtatatatataccacagtttctttatccacttgttgattgatggacatttgggctggtttcacatttttgcaattgcgaattgtgctgctataaacatgcgtctgcaagtatcttggccaggcacagtggctcacacctgtaatcccagcactgtgggaggccaaggctggcagattgcttgaggccaggagtttgagaccagcctggccaacatggtgaaaccccgtctctactaaaaatacaaaaattagccgggcgtagcggcaggcccctgaaatcccagctacttgggaggctgaggcaggagaatcacttgaacccagaaggcggaggttgcagtgagctgagatcgtgccactgcactccagcctgggcgacagagcaagactgtttcaaaaacaaaacaaaacaaacaaaacaaaaacatatgtgtgcaagtatcttttttgtataatgacttctcctctgggtagatacccagtagtgggattgctgaatcaaatggtagttctacttttagttagttaaggaatctctgctgttttccatagtggttgtactagttcacattcccaccagcagtgtagaggtattccctgttcaccacatcctcatagtcagtactgttttgctgtgtggccttggatacatcttttccccaccctgggcctcagttctccctatctcagaaatgggtgggagcttggacaggacattttaacctctgctgtggcagaacctccaaggcgaggaggctgtggggaacccaggggaggtgtctagggcagctctgccttttgcccagcctggggagtccagtggcatcagcctaaccccctcccaccctcctctgggcagatcgtgaagaagtcatgctacccacgctggaatgagacgtttgaatttgagctgcaggagggggccatggaggcgctgtgcgtggaggcctgggactgggacctcgtcagccgaaacgacttcctgggcaaagtgagcaccaccgccccgccccccctcctcccccggcaggctgcacctgctgtcccccagcacctggttccattgcagccatcccatcctcagggacctccctccggcttccccaaagagggacactcaggaagcctgggactacccccccacctccaccgtctgccagaaccagcaacttccccccaccaccactggcactaagggacccttggaaggggcccctccccactaagaacagtagttggcaaggaggagacgtaagtctcccagctccaggaaaactgccactatgtccccaggtggtgattgatgtccagagactgcgggtggtgcagcaggaggagggctggttccggctgcagcccgaccagtccaagagccggcggcatgacgagtaagtgcatggagctgggcagccggcctcaaggggtggggtgggggctgacatttgggaattggctacaggcaggcagggcaggggggctgctcagggtgagaggtcaggagacacagctccagggtcccctcagcccctgcccacctagccagcatccttctcatcctggctgggctccacctcccctttatttattatttatttatttatttatttatttattttgagatggagtctcactctgtccccaggctggagtgcaatggcgtgatctcgactcactgcaggctccgcctcccgggttcacgccattctcctgcctcagcctcccaagtagctgggactacaggcacccgccaccgcgcctggctaattttttgcatttttagtagagacagggtttcaccatgttagccaggatggtctcaatctcctgaccttgtgatccacccgtctcggcctccccaagtactgggattacaggcatgagccaccgcgcccggcccctcccctttatttttccccacagttctgcattcagctcagctctgtcttctgtcttttttttgagatggagtcttgctctgtcacccaggctggagtgcagcggcacaatcttggctcactgcaacctccacctcctgggttccagtgattctcctgcctcaacctcctgattagctgggattacaactgtgtaccaccatgctcggctaatttttgtatttttagtagagacagggtttcaccatgttggccaagttggtctcgaacacctgacctcaagtgatccacccgcctcagcctgccaaagtgctaggattacaggcatgggccaccgcacccggccaggtctgtcttcttagctcacaggttgtacaggtctcctgctttctgcctctggaagtttctgaaacaagtactcagacattttccctttgaaaatttccctgcagacctcagaccagggttcaagtctccaaggtcagtgtccctgagccatagctccaactccctatgccagattctccaggaatagggttgtgagataagataggacaccattggccaggagcggtggctcatgcctgtaatcccagctctttgggaggccaaggtgggaggatcacttggggcaaggagtttgagaccagcctgggcaagaaagtgagactccgtctctacaaagaaataaaaattaggccaggcgcggtggctcacgcctgtaatcccagcactttgggaggtcgaggtgggcggatcacctgaggtcaggagtttgagaccagcctggccagatggcgggcacctgtaatcccagctactcgggaggctgaggcaggcagaattgcttgaaccccggaggcagaggttgtagtgagccaagattgcgccattgcactctagcctgggtgacaaagctagactctgtctcaaaaaaaaaaagaacacccagttaaaacttaatttcagataaaagtgaatatatatatatatattttttttttttgagcagaatctcactctgtcacctaggctggatggagtgcagtggcacggtcttggctcactgcaacctccgcctcccaggttcaagcaattctcatgcctcagcctcccgagtagctgggattacaggcatgcacctgtaccaccagtacagtggtgatcatagctcactgtagcctccacctcctgggtgcaagcaatcctcccatctcaacgttccaggtagctaggaccacctcacctggctaaatttttgtagttttagtagagatggggtttcaccgtgatggccgggcttgatgttgaactcctgacctgtgcccggctgtgaatacatttttagtataaaaataaccgctgggcgtggtgactcacacctgtaatcccaacactttgggagtttgaggtgggtggatcacttgaggtcacgagttcgagaccagcctggccaacatggtgaaacaccgtctctactaaaagtacaaaaaatggtggtgggcacctgtaatccaagctactgaagcaggataattgctggaacccaggagacggaggttgcagtgagccgagatcccaccactgcactccagcctcggtgacaagagcgaaactccgtctcaagaaaacagccgggtgcggtggctcatgcctgtaatctcagcacttgggtggccgaggcgggtggatcatgagatcaggagttcaagaccagcctggccaacatggtgaaatcccgtctgtactaaaaatacaaaaattacccggatgtggtggcgggcacctctaatctcagctacttgggaggctgaggatggagaattgcttgaacctgggaggtggaggttgcagtgagccgagatcgcgccactgcactccagcctgggtgacagagcaggactccatctcagcaaaaaaaataaataaataaagaagaagaatgaccatgcactatttgagacatacctatactaaaaatattcaaatttaggccgggtatggtggcgcatgcctgtaatctcagcactttgggaggccaaggcaggaggatcacttgagcccaggagttcaagaccagcctgggcaacatagcaagaccccatctctaaaaaaaatagttaataagtaaataaaatattcacatttaactgggtgtcttgggtcgttttgctaaatctggcagcctgtctaggaagccctctggcttgtttgctgtggcccacagccctcagtggttcagctttgtgtctctgtggaaggccccagacccccattcccccagttcccatccttaacagggtaggagcaggtggacggctgtgtgtccagcacaaggtgtttccatagaaccagccaaggcccatcttgccatcttattttttatttatttattttttttgagacagagtcaggctggagtgcagtggtgcaatcctggctcactgcaacctctgcttcctgggttgaagcgcttctcctgcctcagtctcccgagtagctgcgattacaggcacctgccacaatgcctggctaatttttatatatatattttaatagagatggggttttgccgtgtcagccaggctggtcttgaactcatgacctcaagtgatctgcctgccttggcctcccaaagtgctgagattacaggcatgagccactgcgccaggcccaggggcccatcttaacactgctctgtgcatgaggcttgtgctgagcaggggcagtgggagccttagaggttcccacttggtccacaccctcctctgttctgaacttccctatcagaacagggaagctgggaagctcaatctaatgtggcaagttgctgaactggctcgggtctcagtttccctattaggttgttatgagggttggggatttgcttctgctgtaaagtgtacccatgatggtgccattatctgggagttgatcgattcaaggctggcagctccacatacccaagcttggaggtggcagggagccagacctcgaagacagatagaggtgccttgagtgcagagacaggaagggctttccaaaaacagaaaataaatagcccgggcagagcctgggaggcagagctatgcagggcacccgaatggagggcatgagcagagagatgggaagccggccccaagggaaaaaactggaggccatgggagtggtgtggtccagggtggcctgagtccctggtggagaggtcacaggctgcccattccaggggcaacctgggctccttgcagctggaggtgcggctgcgggacgagacggtgctgccctccagctactaccagccactggtgcacctgctgtgccacgaggtcaagctgggcatgcaggtgagggggcctgggcagggtgggagggtccagtggcagtaggcctgtgcgcctgtccttctaaacccattctgcagagcagaaacctgaggtctggggatgtgaggagctggccagtgtccagggccccgtccccagccaccccttgggaaaatgtcctctttccctgggatgctctgaggtcctcagagggaaaggttcgggatcccccgtgcctctccctgcagggcccagggcagctgatcccactcatcgaggagacaaccagcaccgagtgtcgccaggacgtggccacgaacctgctcaagctcttcctggggcaggggctggccaaggacttcctggacctgctcttccagctggagctgagtcgcaccagtgaggcctgggaaggagctgggcccagaacactgggaggtgtttgggggtgggtgggctcctcctgtaggaggcagatggggtcagagaggagggaggcaaggaacagagccaagggcagaggtgggacagtgggctgggaggtggcgaggaggccctttattgagggggcagcttagatcccccagacccaaggtcctctgtcctccccctcccccaaaagctttgtgccagccccctacccactgggacctctgtttgtaggtgagaccaacaccctgttccggagcaactctctggcctcaaagtccatggagtcttttctgaaggtgaggttgcatgctatattgtcctcatcttgcaaatgacaacactgagcttcagagagagcgacagagggggctgggacttcgactccagtgttctatctccatattcagagccctttaaggttaagaatgtggctgggcatagtggctcatgcctgtaattgcagcactttgggaggctgaggcgggcggatcacttaaggtcaggagttcgagaccagcctggccaacatggcgaaaccccatctctactaaaaatacaaaaattagcctggcatggtggtgggcacctgtaatcccagctactggggaggctgaggcaggagactcacttgaaccaggagccagaggttgtagtgagctcacgccactgcactctagcctgggccccgtgctagactccgtgccccgcacccccccgccaaagagaatgtgtgtgtgattaaaatttaagttagaaacagtctcactatgttgcccaggctggtctcaaactcctggcctcaagtgatcctcctgccttggcctcccaaagtgctaggattacaagggctaagaattctagtcattcattcactcactcattcattcattcatgaataaacagtttgccctgcatgtgtacctggccccctcctgggcggatacggcaggcaaacggtgcaagggcggctgccgggagaaggtgggcagctggagtgggactgggggagacaggatcaatgtgacctgcggtggtccccaggtggccgggatgcagtacctgcacggcgtcctgggccccatcatcaacaaggtgtttgaggagaagaagtacgtggagctggaccccagcaaagtggaagttaaggatgtagggtgaggccgggggtaactccgggggttgcggggtgcagcggcagcgggttgggatcaggccctgtcagcatgtgtgtttgtgcttctgcccacccgtgtattgtcccctgtgtccgtgtcctggctgctgtgagagccactgttcctgtcgtggccctggcgctgaccgcgacctcctctgccaacccgccccgttccacgcaggtgctccgggctgcaccgcccgcagaccgaggccgaggtgctggagcagagcgcgcagacgctgcgcgcccacctgggggccctgctgagcgcgctcagccgctcggttcgcgcgtgccccgccgtggtgcgcgccaccttccgccagctcttccggcgcgtgcgcgagcgcttccccggcgcccagcacgaggtgcgccctccacccgctgggctaggctgggccgggttggactgggctggggcgaggggtgaagagcggtggggaaccagggagcgctggggaggaccagggaggctgtgtcccagcgagggtcagggacggagcctaaggggagggggctgccaggagccctggtctgggggactccagcccgcgctcttccgcacccctccagaatgtaccgttcatcgccgtcaccagcttcctgtgcctgcgcttcttctctcccgccatcatgtcgcccaagctcttccacctgcgggagcgccacgcggacgcccgcaccagccgcaccctgctcctgttggccaaggtgcgggccttgcggccacgggcgggatgcacagctgggtgtcctaccggggccctggcctggactgcagagtgttccctaccggctccggcgaggccactggcacgcccacgtaggcactgcacttcacagtttgcaaagccttcctgtggccaccttgtccgagctccatctcatggataagggaacaggcctgcgaggggtcgggggttgccaaggccgcccatcctgtcggtggtgaatcgcgggaccttccaacccgggtctgcttactctcaggctgcacctatgtgcccggcaccggggtggggtatccagtgcagcagcgtcagttaaacctacagaggaaggcccaagtggtctcagttatcataaggcatcaaacttcatgatcctctcctccctgatccctagtggggctggagggggcccgtgggcatggcctctgtcgcctctgcctccatcgctacagctgagtagcaaagacttggggagggggggtgggagggggtgcagtggctaggcccctaacctagcagaacctggtccttcctgctgtcacctccaggcagtccagaacgtgggcaacatggacacgccggcttccagggccaaggaggcttggatggagccgctgcagcccaccgtgcgccagggcgtggcgcagctgaaggacttcatcaccaagctcgtggacatcgaggagaaggacggtgagcgccgccctgcacagacccgcccacagcctactgctgacgtttgctccgcccttgagccccacggccccacccatcgctgtttgttcctctcgtggccccacccaccgcctgctgttggcatttgccaggcccccaggccatagacccacgcaccactgtttgtgcttcctgtgaccctgcccactgcctgccgttgacgtttgccccacccctagacccatggcctcacccccccatcatctgtgcctgttgacatttgctccatccttgagctccatagccccgccgccacctgctactgacgcgtgtcccgcctccaagcccatggccctgccttcctcagtccacctgtcaccccgctcaccaccagctgttgatgtttgctccgcccttgagccccatgactacgtccactgcctgctgttcagatttgctcagcccttgagccccatggcccctcccactgctccgctccccccagtcccgccctcattcactgggctctctattcccctccctccctggcctggcagagctggacctgcagcggacgctgagtttgcaggcgccacctgtgaaggaggggccactcttcatccacaggaccaagggcaagggccccctcatgtcctcctccttcaagaagctctacttctccctcactaccgaggccctcagcttcgcgaagacgcccagctccaaggtgggtaaggagggaggccggcaagtggggctctgagaggccggcaagtggggcacctgtccccttccttggagcccacttgaggtacccccggggtcagagaagaaagccaggtgtgtggcatctgtactgcttgtcagaacctaggagggccgggcacggtggctcacgcctgtaatcccaggactttgggaggccaaggcgggtggatcacttgaggttaggagtttgagaccagcctggccaacatggagaaaccccgtctctactaaaaatacaaaaaatcagccgggtgtggtggtgggtgcctgtagtcccagctactcgggaggctgaggcacgggaatcgcttgaacctgggaggcagaagttgcagtgagccgagatcgtgccactgcactccaacctgggcaacagagcaagactccgtctcaaaaaaaaaaaaaaatgaatatggaggaagttgatccgaccttaccaggttgttgaggattaaatgagatgatctccctaagggtcctgacccagggcctggcaggtagtactatttaggcaaatgatattattaaagatagtataacacctgggctgctagatgagtaggaggctagggcaaacaggggaggcttcctggaagaggcaggaatatagaagcacggaatcttggcgtgggaagggatctcaaagatcaccttgtacagccctctctgagtcatgggtcacctctcctgcaagctctcttctcccaggaagggctgaggacatacttcctccatggacctggtgactgcttgctgtacacctgcccccagtcatgcaggctatggggatgatcttccaggagtacccagcctagccctgggcaggtgagagcgggctaggagtaggtgaaggagctcatcacccaccctgttctcaaccagctcaggggtcccaccagatgaggggcccgccccttccgaccaaagacccctcagatgatgataattattttttgagacagggtcttgctctgtcacccaggctgtagtgcagtggtgcgatcatagctgaccgcagcctcaaactcctgggctcaagcaatcttcctacctcagcctcccgagtagctgggactacaggcacgtgccaccaagcccagctaattttctttaacttgtttttttgcggagatgggggtcttgctatgctgcccaggctgttctcaaactcctggcctcaggcaatcctcctgccccagcctcccaaagcactcagatgattattatacatcttccttgcccgggttgaaagatttgactacatgggcattatttaattctggtcccattttttttttttttttttgagatggagtttcgcttttgttgcccaggccagagtgcaatggtgcgatcttggctcaccgcaacctccgcctcccgggttcaagcgattctcctgcctcagcctcccaagtagctgggattacaggcatgcgccaccatgcccggctaattttgtatttttagtagacacggagtttctccatgtttgtcaggctggtctcgaactcccaacctcaggtgatccgccttcctcggcctcccaaaatgctgggattacatgtgtgagccactgcgcccggtcaggatatgactattagagcctgggactacaaaagcaagttggaaaattaataaatgcaaagtcacaaagccttggccacggccggattgactttgtagcccagggaatgctggctgtcccgacactaccccaaagctcacacctccgaggccttctgggagtgccccccagagaggccaggtcctcctctcccagttgctgggcacttggtcaccatcagtctgtgctctgccctggctgaggtcactctaggtctcccatgcctacccctggtgctgcagaaggggagactgaggcccagagatggggaatggaatgcccctggctaggtccctgagcctcctcctccctgcctgccccagaaaagcgccctcatcaagttagccaacatccgggcagcggaaaaggttgaggaaaagagctttggcggctcgcacgtcatgcaggtcatctacacggacgacgccggcaggccccagactgcctacctgcagtgcaaggtgcggggaggggagcgggtgctgtgggagtggcctgaacactgtgggagtggcttgggtgctgtgggagaggcctgggtactgtgggagtggcatgagtcctgtgggagtggcctgggtattgtgggagaggcctgagctctatgggagtggcctgggtgctgtgggagtgccctggatgctatgggaatgccctgggtgctgtgggaatggcctgggtgctatgggagtggcctgagctctgtgggagtggcctggctgctgtgggaggggcctgagtggactggatgagaaaagagttgattgagcctctcgccccgctaccagctacatcaggcaccgcagggtgtgtctaatctgggaggtgtcagggacaggtgtgtgtgtgttgtccaggggcctgagccccaggaggccatggcccatgtctttccctgggcatccatgtgtaggtctgtgtgtgggccagtgcacagacaggtgcatccccgtgatgtgaaatttgcacgttgcacccgtttgttggaaactatttccagataactgagatgggggccaggcacgctggttcacacggataatcccagcattctagccagggcaacagagcaagaccctttctctaaaacagaaagtctgagctggcacctgtgtggttctgtgtctgtatcaatgcctaataatcaaacattatgctgtgtgtggctctgggtgcatgttctcaagtaaccttctcatctgttccttcattaactcattcattcatttatttaaaaaatacttactgagcacctcctaggttccaggcatgattctaggtgaggggatacagtggcagatgaggcagagtcctgccctcatggagctgatatccctgggagaagatgggccaataaatacatgtttcaaatgtcggctcatgcctgtagtcccagtactttgggaggctgaggtgggaggatcactggaggccaggagtttgagaacagcctggccaatgtagcaagaccccatctctacaaaaagaaaattagccagccatgatggcatgcacctgtgattccagctacttgggaggctgaggcaggaagatagcctgaacccaggagttggaggctgcagtgaactatgatcacaccactgcactccagcctgggctacagagtgagaccctgtctcttaaaaaaaaaaaaaaaaaaaaaaagcaaattgtgatagtgacttgaagggaaccagaagggactaagggagcaagggagggaagagagtggggtatagcagggagcggtctgtcctattaagagtggtcagggagagtacaaaaagtagccgggcgtggtggcgcgtgcctgtagtcccagctacttgggggactgaggcaggagaatcgcttgaacctgggaggtggaggttgcagtgagctgagatcgagccactgcactccagcctggtgacagagcaagactccatctcaaaataaataaataaataaattagtaaattaattaaagagtggtcagggaggacctctgatgggtggcattcgagcagggaccttgtaggagggtgacccagatgtgtatctagggcagggacatgtgggacaagtaagaagcctgcagctggaggggggttggtttcttccgggcttgaccgtcctggcctgtggggaggaagtcacagacctgtccctctgtgcccttccctctaggagttcccttttgtgtcagggtccagagccactgggaaaagtagtgatatcagggccaccaaatatatttggcgggttctggaatacctacgagcgtggccaaggggccagcggcggctgaaatccagcccacaccagcctcctgggctcctaccatcccggtgccttccgtggggacaagtggagctgctgccaccaaaaagacgagacaggtgggagaggagaggatgaagtcttgctgtgttgcccaggctggtcttgaattcctgggctcaagcgatcctcccacctcggccccctataatcccagctgtagtcccagcactttgggaggctgaggtgggaggatcactggaggccaggagtttgagaacagcctggccaatgtagcaagaccccatctctaaaaaaaagaaattagccagccatgatggcattataggagtgagccactgggattataggagtgagccactgcacctgctctccaggccatgcgcccgggcatgggtcatgttccactggaggaagggcagcttctcctaattcactcaaagctgctgggttggtatggtggggaacatggcgtctggcgtggtacaggagctccgggttaggagggcttcctggaggaggtgacgtctgaacaggcctccccctccgtgtcccctgcagtgtgtgaatgagcttaaccagtggctgtctgcgctgcggaaggtgagcatcaacaacaccggactgctgggctcctaccaccctggcgtcttccgtggggacaagtggagctgctgccaccaaaaagagaagacaggtgggagaggaggcctgggtcccgggctctgcatccgtccactgcgagatcgggcctctggctgaacgatgggaccctgagccctgctgtgcacctgcagggacctaacccaaggaatgctggcccctccaggagctctgggcagaaagggtcccgtggaccaggtggtttgggaaatgccacgtgatgtgtgtgatgcatatgagtgaattcgctgaaggctctaaggaggcccgaaaacacgttagaatcccatttctttttatttcttcttcttcttttttttttttttttcagacacagactttcactctgtcccccagactggagtgcaatggcacgatctcagctcgctgcaatctccacctcccagggtcaagcaattctcctgcctcaacctccccagtagctgggatgaccggcactcgccaccaagcctagctaatttttttgtattttgactagagatggggtttcaccatgttagtcaagctgctcttgttttgttgttgttgttgttgttgttgttgtttgatactgagtctcgctctatcatccaggctggagtgcagtggtgcaatctcggctcactgcaatctccgtttcccaggctcaagtgattctcctgcctcagcctcccaagtactacaggcgcaagccactgcacccagctaagttttgtattttcagtaaagacggggttttaccatgttggccaggctggtcttgaactcccgacctcgtgatctgccctcctcggcctcccaaagtgctgggattacaggtgtgagccaccacgcccggcctagaattccatttctaacgtggtttaacccagcacttcccaaactcttttgacagggaacccttctcttccccaaggagcttcttacagaacaggtgttctcaggaacacattcgaggagccccctgctaatgagagccagagagcccctgggttcgcacactccaatgctggccatctgaatccggagctgtgggtgggaggggaccctgagccttgggcactagagggatggcatagaggagcttctagaaggactccatactgtgtagtactctaggttctagcacctgtggttcttgagcacttgaaatgtggcttgaggagctgaggggttttttttgtttaattttttaaaacagggtcttgctctgttgcccaggctggagtgcagtggcacgatcatagctcactgcagcctccaactcctgggctcaagcaatcctcctgcctcagcctctgagtaggctggcactaccggcatgcatcaccacacctggctcatttaaaaaaaattgttttagaggtggggtcttgctatgttgttcaggctggtcttgaattcccaggctcaagcaatcctcctgcctcggcctcccaaagtgctgagattgtaggagtgagccaccacatctggcctgagtttcacatttttaaaaatgttgttttggccgggtgtggtggctcacgcctgtaatcctagcactttgggaggccaaggtaggcggattgcctgagctcaggagttagagacgagcctaggcaacatggtgaaaccccatctctgctaaaatacaaaaaaaaaattagccaggcatggcggcgtgggcctgtagtcccagctactcaggaggctgaggcaggagaactgcttgaacctgggaggcagaggttgcagtaagccaagatggtgccactgcactccagcctggcgacagagcgagactccatctcaaaaaaaaaaaaacaaaaaaacaaaaaaaaaaacagaaaagaaacaaaaaacgttgttttaattttaattaactcaaatagcttcatgtggctagctgccgccctgtagaacagcacagttctagaactttcgagaccttctccctgttatccacacttactttacagagtagactcagcacttcgagtcccctgtccttcaggccaggccaaaccttggtccccagagcccagtgtggcagaggccatcgaaaactgacccacgcactctagcccagccctggatttacagccaagcactgtatagggatgggtgactcttttgtttttgtttttgttttgagttgggtctctcactctctcacccaggctggagtgcagtggcataatcatagctcactgtagccttgacctcctgggctcaagccatcctcctgcctcagcctcctgcagaactgggactacaggcacatgccaccacacccagctattttttattttatttttttgtagagtcagggtctcactatgttgcccagactggtcttgaactcctggcctcaagctatcttcctgcctcagcctcccaaagtgctgggattacaggtgtgagccactgtgcctggcctcttggtgactctttgcaagggcattgctggctggctgatatggcctgcagcctctgcctgtaaccatcagagcgatactctcattatcggcaaggtgggacccaccctggcccaagagacagggcctgttattccactgtatggaggagaagctgaggcttagggaaggcagatgacttggcaaggtcataaagacagcaagctgcaggaccagctcattctaaggcatgaaccccctgtggcccacctcaccatgatgttaacatttcagcctgctcccttccaggcagacagtcttccagaaagttacccggctccctggctgggcgcggtggctcacgcctgtaatctcagcactttgggaggccgagacgggcaaatcacgaggtcaggagatcgagaccatcccggctaacacaatgaaaccccgtctctactaaaaatataaaaaattagctgggcgtggtggcgggcatctgcagtcccagctactcaggaggctgaaacaggagaatggcgtgaacctgggaggcagagctcgcagtgagccaagatcgcac

SEQ ID NO: 1234 - DNA, 1547 bp, Homo sapiens
gcgtctgtaatcccagctactcaggaagctgaggcagggagaattgcttgaacctgggaggcagaggttgcagtgagctgagatgacgccactgcactctagcctgggcgacagagcgagactccgtctcaaaaaaataaaataaaataaataacagccagagagaggcagccctgtgccccatccagagcagagaggaatgtcagggggtagtgattggtggtgaacagtagggtctggcacagggaaaacacatcagtggcagagccagttgttataggggtagggggagatacaaggaaggtccaagcccagggcctgggggtggcctgggcacatgctgagggttctctcctgcaggacagccacagtgtggaagaccctgtgccccttctggggtgaggagtaccaagtgcacctgccgcccaccttccacgctgtggctttctacgtcatggatgaggatgccctcaggtgagtgcccccctctccagctgggacccagacctggccatctgattgctccctggcccatttcaccaccaggactcctgggtcctttttggcatcctctttgcagcctggagggaggcagagcctgggggcctgggagggcgaaaggcttgagcatgtgggtgtgcacatgcgtggctccatggtgcatgcaccacatacacacgtgtgtgtgcaggcatgcgggcacaagtgtgcatggactacacgtgtgcgtgcaggtgtgagctgtgagatgggcacccagagagtgtgagcttggcatgtgtgggcatgtgagaaacctatcacatccccctagagggtccagaacccacagcctacagaagggccacaggtccagctctgttgggttactctggaaatgacatcggtgtccaccaccctgctccccccgggggggccctgaacttggtgggaggtcccagagggcagatactgaagccctgcccagctctgcctccatctccctcctctagccgggacgacgttatcggaaaggtctgccttacaagggacaccatagcttctcaccctaagggtaagttctcccttccctcccgcactggtctgcccagtccctggcctccctcccactcagagacctcccctctaggctccgtctggtctcctgctcagggaaagccatttctactctccccagaagccggggccacgttctgtactcctggcctctgttctgcagcatgttcccaagcctggttgttactgcctcttccctagggtgaagaggggctgctatgggtggaatctgaggcctctgctggcagaagaaggggcctccttacactctattgctgaagcatagggaccccttctccaaatcaggccagctccttctgtaacccatggggtctcctccatctgggccctagtactactgtgtcctaagtctgaagggttggcctagagccagtccaggctggagatccctttcaattatttctgggatgcagacattgttttgtgttattgtttttacaatttttatatagttttttaaaaaaagaaaa

SEQ ID NO: 1235 - DNA, 239 bp, Homo sapiens
ataggcgtgagccgctgtgcccagcctcaaacactttttctttcaacgacattgacctatagtgaatatcaaaagcatgcactgaaactcaagagctgcctcctctcctgtgccaggatgcactgtaacttttgtgagccctaggcatgtttgacttatatgggttaagatattcaaatacggctaggcacggtggctcacgcctgtaatcctaacactctgggagaccgaagtgggca

SEQ ID NO: 1236 - DNA, 283 bp, Homo sapiens
cttctgcatccctcacccaattgtccctcccggctaacaagccagctgcaccccccaggcagaggtcctgcagcagtcggtataggcagcctgggcagggggcttgtcatagatctgcctctggccacgagatcttctgctccccctacggctgctagccgcagctgtccactaccccttagctttattctctctattcaggggcctcctgctgcgcactccaagggggtgcacgtttccaaagagagatcaagggacatggggaaaggagaaaggtacagct

SEQ ID NO: 1237 - DNA, 255 bp, Homo sapiens
ccgggcacggtggctcacacctgtaatcccagcactttgggaggccgagacgggtggatcacgaggtcaggagatcgagaccatcctggctaacaaggtgaaaccccgtctctactaaaaatacaaaaaaattagctgggcttggtggcaggcacctgtagtcctagctacttggcaggctgaagcaggagaatggcgtgaacccgggaggcagagcttgcagtaagccgagatcgcgccactgcactccagcct

SEQ ID NO: 1238 - DNA, 318 bp, Homo sapiens
gaaagggctctctccttgttggccaacccagtgggccctttagctgtgacgggtgtgccctgggcccaccaggacaggagcaaggtcaggagggctgctctgctctgcaaaacagaggctgatggatctgaagtttctgttactgggagaataaagggaggtgaaggagacacgtggtaggtcccctgggaaggtggtgggaacgcgtgtgaaatgctcggagaggcacagtaagaaccggcctgtttagaatccagtgttctacgcctgccccaggccccagcaattctgcttctagacatctccccatgagaaatg

SEQ ID NO: 1239 - DNA, 2009 bp, Homo sapiens
gtcaccgatggccagagactccaccctttagctacacttgtggcgacccatccacctacagagtcaccttccccgtctgcccccagaagctgtcactggctcctccgagtgccaaggccagcccccacaaccctggaagctgcggggagccccaggccaagttcctagaagcattctttgaagaacccccaaggaggcaatccccagtgtccaacctgggctcagaaggagaatgtccgagttcaggggctggcagccaagcccaggagcttgcagaggcctgggagggctgtagaaaggacctgctctttcagaagagtccccagaaccacaggccaccttcagtcagtgaccagactggggagaaggaaaattgctaccagcacatgggcaccagcaaaagccctgctccaggattcatccatctacgcaccgagtgtgggcccaggaaagaaccgtgtcaggaaaaggctgcccttgagagggtacttcggcaaaagcaagatgcccaagggttcacacctccccagctgggtgccagccaacagtatgcatctgacttccataacgttttgaaggaggagcaggaggcactgtgcttggatctgtggggcacagagaggcgagaggagaggagggagcctgagccccacagcaggcaaggacaagctctgggggtcaagagagggtgccagctccatgagcccagctcggcactgtgtccagctccatccgccaaagtcatcaagatgcccaggggtggcccccaacagctggggacgggggccaacactccagccagggtctttgtggccctctctgattacaaccccctggtgatgtctgccaacctcaaggctgcagaggaggagctggtcttccagaaaaggcagttgctaagagtgtggggctctcaggacacccatgatttctacctcagcgagtgcaacaggcaagtgggcaatatccccgggcgcctagtggctgagatggaggtggggacagagcagactgataggaggtggcgttctccggcccaagggcacctgccttctgtggcccacctcgaggactttcaggggctcaccatcccccagggttcctccctggtgctccaggggaactccaagagactcccactgtggactccaaagatcatgatagcagctctggactatgatcctggggatgggcaaatggggggccaggggaagggcaggctggcgctgagggcaggagacgtggtcatggtttacgggcccatggatgaccaaggattctattatggagagttgggcggccacaggggcctggttcctgcccacctgctggatcacatgtccctccatggacactgagcaagcatccttgcccaggtagtggcctctggctgctcacaccctgccagaggagaagcaagcgttcagaccctcacaccagcacccctcctcaccaccataagtagcatgtgctccaagtgccactgtgttaaactgatggtagtccttaagcgtcccctaggctctgaaagtagcaggacttaagcctgagttatttgcaaaagcaaacacaacaagccaacccctgagagtctgagaagccatttcaaagttgctgataactatggcaggtatacggagaagcgcctttttctgtggccaatgtgtgttttctctgggaggttaaggttatctgtccattgccttgtacgaaagtctcaagaaaagtctacatcttaaaaaagaaaaagcaatctgagtgttatttttgggatgtgagggtgatctggctgcgacatgtgtcaccccattgatcatcagggttgattcggctgatctggctgactaggcgggtatccccttcctcccgcaccactccatgtgcgtccctccagaagctgtgtgctcaatggaagaggatgaccatccccgatagaggacgatcggtcttcagtcaagagtataagagtagctgcgctcccctgctagaacctccaaacgagctttcag

SEQ ID NO: 1240 - DNA, 1747 bp, Homo sapiens
gtcaccgatggccagagactccaccctttagctacacttgtggcgacccatccacctacagagtcaccttccccgtctgcccccagaagctgtcactggctcctccgagtgccaaggccagcccccacaaccctggaagctgcggggagccccaggccaagttcctagaagcattctttgaagaacccccaaggaggcaatccccagtgtccaacctgggctcagaaggagaatgtccgagttcaggggctggcagccaagcccaggagcttgcagaggcctgggagggctgtagaaaggacctgctctttcagaagagtccccagaaccacaggccaccttcagtcagtgaccagactggggagaaggaaaattgctaccagcacatgggcaccagcaaaagccctgctccaggattcatccatctacgcaccgagtgtgggcccaggaaagaaccgtgtcaggaaaaggctgcccttgagagggtacttcggcaaaagcaagatgcccaagggttcacacctccccagctgggtgccagccaacagtatgcatctgacttccataacgttttgaaggaggagcaggaggcactgtgcttggatctgtggggcacagagaggcgagaggagaggagggagcctgagccccacagcaggcaaggacaagctctgggggtcaagagagggtgccagctccatgagcccagctcggcactgtgtccagctccatccgccaaagtcatcaagatgcccaggggtggcccccaacagctggggacgggggccaacactccagccagggtctttgtggccctctctgattacaaccccctggtgatgtctgccaacctcaaggctgcagaggaggagctggtcttccagaaaaggcagttgctaagagtgtggggctctcaggacacccatgatttctacctcagcgagtgcaacaggcaagtgggcaatatccccgggcgcctagtggctgagatggaggtggggacagagcagactgataggaggtggcgttctccggcccaagggcacctgccttctgtggcccacctcgaggactttcaggggctcaccatcccccagggttcctccctggtgctccaggggaactccaagagactcccactgtggactccaaagatcatgatagcagctctggactatgatcctggggatgggcaaatggggggccaggggaagggcaggctggcgctgagggcaggagacgtggtcatggtttacgggcccatggatgaccaaggattctattatggagagttgggcggccacaggggcctggttcctgcccacctgctggatcacatgtccctccatggacactgagcaagcatccttgcccaggtagtggcctctggctgctcacaccctgccagaggagaagcaagcgttcagaccctcacaccagcacccctcctcaccaccataagtagcatgtgctccaagtgccactgtgttaaactgatggtagtccttaagtgtcccctaggctctgaaagtagcaggacttaagcctgagttatttgcaaaagcaaacacaacaagccaacccctgagagtctgagaagccatttcaaagttgctgataactatggcaggtatacggagaagcgcctttttctgtggccaatgtgtgttttctctgggaggttaaggttatctgtccattgccttgtacgaaagtctcaagaaaagtctacatcttaaaaaagaaa

SEQ ID NO: 1241 - DNA, 2009 bp, Homo sapiens
gtcaccgatggccagagactccaccctttagctacacttgtggcgacccatccacctacagagtcaccttccccgtctgcccccagaagctgtcactggctcctccgagtgccaaggccagcccccacaaccctggaagctgcggggagccccaggccaagttcctagaagcattctttgaagaacccccaaggaggcaatccccagtgtccaacctgggctcagaaggagaatgtccgagttcaggggctggcagccaagcccaggagcttgcagaggcctgggagggctgtagaaaggacctgctctttcagaagagtccccagaaccacaggccaccttcagtcagtgaccagcctggggagaaggaaaattgctcccagcacatgggcaccagcaaaagccctgctccaggattcatccatctacgcaccgagtgtgggcccaggaaagaaccgtgtcaggaaaaggctgcccttgagagggtacttcggcaaaagcaagatgcccaagggttcacacctccccagctgggcgccagccaacagtatgcatctgacttccataacgttttgaaggaggagcaggaggcactgtgcttggatctgtggggcacagagaggcgagaggagaggagggagcctgagccccacagcaggcaaggacaagctctgggggtgaagagagggtgccagctccatgagcccagctcggcactgtgtccagctccatccgccaaagtcatcaagatgcccaggggtggcccccaacagctggggacgggggccaacactccagccagggtctttgtggccctctctgattacaaccccctggtgatgtctgccaacctcaaggctgcagaggaggagctggtcttccagaaaaagcagttgctaagagtgtggggctctcaggacacccatgatttctacctcagcgagtgcaacaggcaagtgggcaatatccccgggtgcctagtggctgagatggaggtggggacagagcagactgataggaggtggcgttctccggcccaagggcacctgccttctgtggcccacctcgaggactttcaggggctcaccatcccccagggttcctccctggtgctccaggggaactccaagagactcccactgtggactccaaagatcatgatagcagctctggactatgatcctggggatgggcaaatggggggccaggggaagggcaggctggcgctgagggcaggagacgtggtcatggtttacgggcccatggatgaccaaggattctattatggagagttgggcggccacaggggcctggttcctgcccacctgctggatcacatgtccctccatggacactgagcaagcatccttgcccaggtagtggcctctggctgctcacaccctgccagaggagaagcaagcgttcagaccctcacaccagcacccctcctcaccaccataagtagcatgtgctccaagtgccactgtgttaaactgatggtagtccttaagcgtcccctaggctctgaaagtagcaggacttaagcctgagttatttgcaaaagcaaacacaacaagccaacccctgagagtctgagaagccatttcaaagttgctgataactatggcaggtatacggagaagcgcctttttctgtggccaatgtgtgttttctctgggaggttaaggttatctgtccattgccttgtacgaaagtctcaagaaaagtctacatcttaaaaaagaaaaagcaatctgagtgttatttttgggatgtgagggtgatctggctgcgacatgtgtcaccccattgatcatcagggttgattcggctgatctggctgactaggcgggtatccccttcctcccgcaccactccatgtgcgtccctccagaagctgtgtgctcaatggaagaggatgaccatccccgatagaggacgatcggtcttcagtcaagagtataagagtagctgcgctcccctgctagaacctccaaacgagctttcag

SEQ ID NO: 1242 - DNA, 2009 bp, Homo sapiens
gtcaccgatggccagagactccaccctttagctacacttgtggcgacccatccacctacagagtcaccttccccgtctgcccccagaagctgtcactggctcctccgagtgccaaggccagcccccacaaccctggaagctgcggggagccccaggccaagttcctagaagcattctttgaagaacccccaaggaggcaatccccagtgtccaacctgggctcagaaggagaatgtccgagttcaggggctggcagccaagcccaggagcttgcagaggcctgggagggctgtagaaaggacctgctctttcagaagagtccccagaaccacaggccaccttcagtcagtgaccagcctggggagaaggaaaattgctcccagcacatgggcaccagcaaaagccctgctccaggattcatccatctacgcaccgagtgtgggcccaggaaagaaccgtgtcaggaaaaggctgcccttgagagggtacttcggcaaaagcaagatgcccaagggttcacacctccccagctgggcgccagccaacagtatgcatctgacttccataacgttttgaaggaggagcaggaggcactgtgcttggatctgtggggcacagagaggcgagaggagaggagggagcctgagccccacagcaggcaaggacaagctctgggggtgaagagagggtgccagctccatgagcccagctcggcactgtgtccagctccatccgccaaagtcatcaagatgcccaggggtggcccccaacagctggggacgggggccaacactccagccagggtctttgtggccctctctgattacaaccccctggtgatgtctgccaacctcaaggctgcagaggaggagctggtcttccagaaaaggcagttgctaagagtgtggggctctcaggacacccatgatttctacctcagcgagtgcaacaggcaagtgggcaatatccccgggcgcctagtggctgagatggaggtggggacagagcagactgataggaggtggcgttctccggcccaagggaacctgccttctgtggcccacctcgaggactttcaggggctcaccatcccccagggttcctccctggtgctccaggggaactccaagagactcccactgtggactccaaagatcatgatagcagctctggactatgatcctggggatgggcaaatggggggccaggggaagggcaggctggcgctgagggcaggagacgtggtcatggtttacgggcccatggatgaccaaggattctattatggagagttgggcggccacaggggcctggttcctgcccacctgctggatcacatgtccctccatggacactgagcaagcatccttgcccaggtagtggcctctggctgctcacaccctgccagaggagaagcaagcgttcagaccctcacaccagcacccctcctcaccaccataagtagcatgtgctccaagtgccactgtgttaaactgatggtagtccttaagcgtcccctaggctctgaaagtagcaggacttaagcctgagttatttgcaaaagcaaacacaacaagccaacccctgagagtctgagaagccatttcaaagttgctgataactatggcaggtatacggagaagcgcctttttctgtggccaatgtgtgttttctctgggaggttaaggttatctgtccattgccttgtacgaaagtctcaagaaaagtctacatcttaaaaaagaaaaagcaatctgagtgttatttttgggatgtgagggtgatctggctgcgacatgtgtcaccccattgatcatcagggttgattcggctgatctggctgactaggcgggtatccccttcctccctcaccactccatgtgcgtccctccagaagctgtgtgctcaatggaagaggatgaccatccccgatagaggacgatcggtcttcagtcaagagtataagagtagctgcgctcccctgctagaacctccaaacgagctctcag

SEQ ID NO: 1243 - DNA, 375 bp, Homo sapiens
agaaaaaacatattttagaagttgaagcacaaccaaggaaacatgagcctggctttcctccctctcacttctgcgcactgggtccgcaagggctacagaaatgttttcctggctgaggaagggagggtgcacccttctgctttttttttcctggctgcagtctattcccagaacacattccatcacatggttcccagaactcagattgtgcggtggccacgtcatcattggctggggctcacagtcacagcagcagaggcctccctaaacctccctctcctctagccccacccgctgtcccctgctcctcatgcccccatgctgtgtcccctggcctcacttccgttgccatgttttcataatcctctcaggctc

SEQ ID NO: 1244 - DNA, 494 bp, Homo sapiens
ggcgctccagtgtcggcctggtcaccctcctgaacagccctgggagaccagtcaaatgccggagtcccaagttaaaggtagcagaaggcccaagttccacgcacggcctgaagactacgcagtgtcacagcccaacagagacatacaggagaaaagggaagcctccctcgaggagagcccagttgcccttggggagtcagccagtgtcccccaagtttcagagacagtccctgccagccaacctctgtccaagaaaaccagctcccagtcaaactcctcctctgaggggtcgatgtgggccaccgtgccgtcctcccctactctggacagggacacagccagtgaggtggatgacctggagcctgacagcgtgtccctggccctggaaatggggggctcggcggctcctgctgcccccaagctcaagatcttcatggctcagtataactacaacccatttgaggggcccaatgatcaccctgagggtgagctgc

SEQ ID NO: 1245 - DNA, 205 bp, Homo sapiens
ttttttttttttttttgagatggagtcttgctctgttgcccaggctggagtgcagtggtgcaatctcagttcactgcaagctctgcctcccgggttcacgccattctcctgcctcagcctcctgagtagctgggactacaggcgcccgccaccacgcctggctaattttttgtatttttactagagacggggtttcactgtgtta

SEQ ID NO: 1246 - DNA, 494 bp, Homo sapiens; identical to SEQ ID NO: 1244

SEQ ID NO: 1247 - DNA, 375 bp, Homo sapiens
agaaaaaacatattttagaagttgaagcacaaccaaggaaacatgagcctggctttcctccctctcacttctgcgcattgggtccgcaagggctacagaaatgttttcctggctgaggaagggagggtgcacccttctgctttttttttcctggctgcagtctattcccagaacacattccatcacatggttcccagaactcagattgtgcggtggccacgtcatcattggctggggctcacagtcacagcagcagaggcctccctaaacctccctctcctctagccccacccgctgtcccctgctcctcatgcccccatgctgtgtcccctggcctcacttccgttgccatgttttcataatcctctcaggctc

SEQ ID NO: 1248 - DNA, 375 bp, Homo sapiens; identical to SEQ ID NO: 1243

SEQ ID NO: 1249 - DNA, 1574 bp, Homo sapiens
atcacaaagaaaatctttaagtcccaccttaagtcaagtcggaattccacttcggtcaaaaagaaatctagccgcaacatattcagcatcgtgtttgtgttttttgtctgttttgtaccttaccatattgccagaatcccctacacaaagagtcagaccgaagctcattacagctgccagtcaaaagaaatcttgcggtatatgaaagaattcactctgctactatctgctgcaaatgtatgcttggaccctattatttatttctttctatgccagccgtttagggaaatcttatgtaagaaattgcacattccattaaaagctcagaatgacctagacatttccagaatcaaaagaggaaatacaacacttgaaagcacagatactttgtgagttcctaccctcttccaaagaaagaccacgtgtgcatgttgtcatcttcaattacataacagaaatcaataagatatgtgccctcatcataaatatcatctctagcactgccatccaatttagttcaataaaattcaaatataagtttccatgcttttttgtaacatcaaagaaaacatacccatcagtaatttctctaatactgacctttctattctctattaataaaaaattaatacatacaattattcaattctattatattaaaataagttaaagtttataaccactagtctggtcagttaatgtagaaatttaaatagtaaataaaacacaacataatcaaagacaactcactcaggcatcttctttctctaaataccagaatctagtatgtaattgttttcaacactgtccttaaagactaacttgaaagcaggcacagtttgatgaagggctagagagctgtttgcaataaaaagtcaggtttttttcctgatttgaagaagcaggaaaagctgacacccagacaatcacttaagaaaccccttattgatgtatttcatggcactgcaaaggaagaggaatattaattgtatacttagcaagaaaattttttttttctgatagcactttgaggatattagatacatgctaaatatgttttctacaaagacttacgtcatttaatgagcctggggttctggtgttagaatatttttaagtaggctttactgagagaaactaaatattggcatacgttatcagcaacttcccctgttcaatagtatgggaaaaataagatgactgggaaaaagacacacccacaccgtagaacatatattaatctactggcgaatgggaaaggagaccattttcttagaaagcaaataaacttgatttttttaaatctaaaatttacattaatgagtgcaaaataacacataaaatgaaaattcacacatcacatttttctggaaaacagacggattttacttctggagacatggcatacggttactgacttatgagctaccaaaactaaattctttctctgctattaactggctagaagacattcatctatttttcaaatgttctttcaaaacatttttataagtaatgtttgtatctatttcatgctttactgtctatatactaataaagaaatgttttaatac

What is claimed is:

1. An isolated nucleic acid molecule comprising a polynucleotide having a nucleotide sequence at least 95% identical to a sequence selected from the group consisting of:
(a) a polynucleotide fragment of SEQ ID NO:X or a polynucleotide fragment of the cDNA sequence contained in Clone ID NO:Z, which is hybridizable to SEQ ID NO:X;
(b) a polynucleotide encoding a polypeptide fragment of SEQ ID NO:Y or a polypeptide fragment encoded by the cDNA sequence contained in cDNA Clone ID NO:Z, which is hybridizable to SEQ ID NO:X;
(c) a polynucleotide encoding a polypeptide fragment of a polypeptide encoded by SEQ ID NO:X or a polypeptide fragment encoded by the cDNA sequence contained in cDNA Clone ID NO:Z, which is hybridizable to SEQ ID NO:X;
(d) a polynucleotide encoding a polypeptide domain of SEQ ID NO:Y or a polypeptide domain encoded by the cDNA sequence contained in cDNA Clone ID NO:Z, which is hybridizable to SEQ ID NO:X;
(e) a polynucleotide encoding a polypeptide epitope of SEQ ID NO:Y or a polypeptide epitope encoded by the cDNA sequence contained in cDNA Clone ID NO:Z, which is hybridizable to SEQ ID NO:X;
(f) a polynucleotide encoding a polypeptide of SEQ ID NO:Y or the cDNA sequence contained in cDNA Clone ID NO:Z, which is hybridizable to SEQ ID NO:X, having biological activity;
(g) a polynucleotide which is a variant of SEQ ID NO:X;
(h) a polynucleotide which is an allelic variant of SEQ ID NO:X;
(i) a polynucleotide which encodes a species homologue of the SEQ ID NO:Y;
(j) a polynucleotide capable of hybridizing under stringent conditions to any one of the polynucleotides specified in (a)-(i), wherein said polynucleotide does not hybridize under stringent conditions to a nucleic acid molecule having a nucleotide sequence of only A residues or of only T residues.

2. The isolated nucleic acid molecule of claim 1, wherein the polynucleotide fragment comprises a nucleotide sequence encoding a protein.

3. The isolated nucleic acid molecule of claim 1, wherein the polynucleotide fragment comprises a nucleotide sequence encoding the sequence identified as SEQ ID NO:Y or the polypeptide encoded by the cDNA sequence contained in cDNA Clone ID NO:Z, which is hybridizable to SEQ ID NO:X.

4. The isolated nucleic acid molecule of claim 1, wherein the polynucleotide fragment comprises the entire nucleotide sequence of SEQ ID NO:X or the cDNA sequence contained in cDNA Clone ID NO:Z, which is hybridizable to SEQ ID NO:X.

5. The isolated nucleic acid molecule of claim 2, wherein the nucleotide sequence comprises sequential nucleotide deletions from either the C-terminus or the N-terminus.

6. The isolated nucleic acid molecule of claim 3, wherein the nucleotide sequence comprises sequential nucleotide deletions from either the C-terminus or the N-terminus.

7. A recombinant vector comprising the isolated nucleic acid molecule of claim 1.

8. A method of making a recombinant host cell comprising the isolated nucleic acid molecule of claim 1.

9. A recombinant host cell produced by the method of claim 8.

10. The recombinant host cell of claim 9 comprising vector sequences.

11. An isolated polypeptide comprising an amino acid sequence at least 90% identical to a sequence selected from the group consisting of:
(a) a polypeptide fragment of SEQ ID NO:Y or the encoded sequence contained in cDNA Clone ID NO:Z;
(b) a polypeptide fragment of SEQ ID NO:Y or the encoded sequence contained in cDNA Clone ID NO:Z, having biological activity;
(c) a polypeptide domain of SEQ ID NO:Y or the encoded sequence contained in cDNA Clone ID NO:Z;
(d) a polypeptide epitope of SEQ ID NO:Y or the encoded sequence contained in cDNA Clone ID NO:Z;
(e) a full length protein of SEQ ID NO:Y or the encoded sequence contained in cDNA Clone ID NO:Z;
(f) a variant of SEQ ID NO:Y;
(g) an allelic variant of SEQ ID NO:Y; or
(h) a species homologue of the SEQ ID NO:Y.

12. The isolated polypeptide of claim 11, wherein the full length protein comprises sequential amino acid deletions from either the C-terminus or the N-terminus.

13. An isolated antibody that binds specifically to the isolated polypeptide of claim 11.

14. A recombinant host cell that expresses the isolated polypeptide of claim 11.

15. A method of making an isolated polypeptide comprising:
(a) culturing the recombinant host cell of claim 14 under conditions such that said polypeptide is expressed; and
(b) recovering said polypeptide.

16. The polypeptide produced by claim 15.

17. A method for preventing, treating, or ameliorating a medical condition, comprising administering to a mammalian subject a therapeutically effective amount of the polynucleotide of claim 1.

18. A method of diagnosing a pathological condition or a susceptibility to a pathological condition in a subject comprising:
(a) determining the presence or absence of a mutation in the polynucleotide of claim 1; and
(b) diagnosing a pathological condition or a susceptibility to a pathological condition based on the presence or absence of said mutation.

19. A method of diagnosing a pathological condition or a susceptibility to a pathological condition in a subject comprising:
(a) determining the presence or amount of expression of the polypeptide of claim 11 in a biological sample; and
(b) diagnosing a pathological condition or a susceptibility to a pathological condition based on the presence or amount of expression of the polypeptide.

20. A method for identifying a binding partner to the polypeptide of claim 11 comprising:
(a) contacting the polypeptide of claim 11 with a binding partner; and
(b) determining whether the binding partner effects an activity of the polypeptide.

21. The gene corresponding to the cDNA sequence of SEQ ID NO:Y.

22. A method of identifying an activity in a biological assay, wherein the method comprises:
(a) expressing SEQ ID NO:X in a cell;
(b) isolating the supernatant;
(c) detecting an activity in a biological assay; and identifying the protein in the supernatant having the activity.

23. The product produced by the method of claim 20.

24. A method for preventing, treating, or ameliorating a medical condition, comprising administering to a mammalian subject a therapeutically effective amount of the polypeptide of claim 11.
